(19) United States
(12) Patent Application Publication
(10) Pub. No.: US 2007/0099239 A1
(43) Pub. Date: May 3, 2007

(54) Methods and compositions for diagnosis and monitoring of atherosclerotic cardiovascular disease

(76) Inventors: Raymond Tabibiazar, Stanford, CA (US); Philip S. Tsao, Los Altos, CA (US); Thomas Quertermous, Stanford, CA (US); Brit Katzen Turnbull, Stanford, CA (US); Richard A. Olshen, Stanford, CA (US); Evangelos Hytopoulos, San Mateo, CA (US)

Correspondence Address: BOZICEVIC, FIELD & FRANCIS LLP, 1900 UNIVERSITY AVENUE, SUITE 200, EAST PALO ALTO, CA, 94303, US

(21) Appl. No.: 11/473,826

(22) Filed: Jun. 23, 2006

Related U.S. Application Data
(60) Provisional application No. 60/693,756, filed on Jun. 24, 2005.

(51) Int. Cl. G01N 33/53; G06F 19/00

(52) U.S. Cl. 435/7.1; 702/19

(57) ABSTRACT

The present invention identifies circulating proteins that are differentially expressed in atherosclerosis. Circulating levels of these proteins, particularly as a panel of proteins, can discriminate patients with acute myocardial infarction from those with stable exertional angina and from those with no history of atherosclerotic cardiovascular disease. Such levels can also predict cardiovascular events, determine the effectiveness of therapy, stage disease, and the like. For example, these markers are useful as surrogate biomarkers of clinical events needed for development of vascular specific pharmaceutical agents.

### CROSS REFERENCE TO RELATED APPLICATIONS

[0001] This application claims the benefit of U.S. Provisional Application No. 60/693,756, filed Jun. 24, 2005, the entire disclosure of which is hereby incorporated by reference in its entirety for all purposes.

### SEQUENCE LISTING

[0002] The present specification incorporates herein by reference, each in its entirety, the sequence information on the Compact Disks (CDs) labeled Copy 1 and Copy 2. The CDs are formatted on IBM-PC, with operating system compatibility with MS-Windows. The files on each of the CDs are as follows: Copy 1—Seqlist.txt 614 KB created Jun. 23, 2006; and Copy 2—Seqlist.txt 614 KB created Jun. 23, 2006.

### BACKGROUND OF THE INVENTION

[0003] 1. Field of the Invention

[0004] This application is directed to the fields of bioinformatics and atherosclerotic disease. In particular this invention relates to methods and compositions for diagnosing, monitoring, and development of therapeutics for atherosclerotic disease.

[0005] 2. Description of the Related Art

[0006] As our ability to provide early and accurate diagnosis followed by aggressive treatment has been limited, atherosclerotic cardiovascular disease (ASCVD) remains the primary cause of morbidity and mortality worldwide. Patients with ASCVD represent a heterogeneous group of individuals, with a disease that progresses at different rates and in distinctly different patterns. Despite appropriate evidence-based treatments for patients with ASCVD, recurrence and mortality rates remain 2-4% per year. Also, the full benefits of primary prevention are unrealized due to our inability to identify accurately those patients who would benefit from aggressive risk reduction.

[0007] Whereas certain disease markers have been shown to predict outcome or response to therapy at a population level, they are not sufficiently sensitive or specific to provide adequate clinical utility in an individual patient. As a result, the first clinical presentation for more than half of the patients with coronary artery disease is either myocardial infarction or death.

[0008] Physical examination and current diagnostic tools cannot accurately determine an individual's risk for suffering a complication of ASCVD. Known risk factors such as hypertension, hyperlipidemia, diabetes, family history, and smoking do not establish the diagnosis of atherosclerosis disease. Diagnostic modalities which rely on anatomical data (such as coronary angiography, coronary calcium score, CT or MRI angiography) lack information on the biological activity of the disease process and can be poor predictors of future cardiac events. Functional assessment of endothelial function can be non-specific and unrelated to the presence of atherosclerotic disease process, although some data has demonstrated the prognostic value of these measurements. Individual biomarkers, such as the lipid and inflammatory markers, have been shown to predict outcome and response to therapy in patients with ASCVD and some are utilized as important risk factors for developing atherosclerotic disease. Nonetheless, up to this point, no single biomarker is sufficiently specific to provide adequate clinical utility for the diagnosis of ASCVD in an individual patient.

### Complex Nature of Atherosclerotic Cardiovascular Disease

[0009] In general, atherosclerosis is believed to be a complex disease involving multiple biological pathways. Variations in the natural history of the atherosclerotic disease process, as well as differential response to risk factors and variations in the individual response to therapy, reflect in part differences in genetic background and their intricate interactions with the environmental factors that are responsible for the initiation and modification of the disease. Atherosclerotic disease is also influenced by the complex nature of the cardiovascular system itself where anatomy, function and biology all play important roles in health as well as disease. Given such complexities, it is unlikely that an individual marker or approach will yield sufficient information to capture the true nature of the disease process.

### Single Biomarker Approach: Inflammation

[0010] Inflammation has been implicated in all stages of ASCVD and is considered to be a major part of the pathophysiological basis of atherogenesis, providing a potential marker of the disease process. Elevated circulating inflammatory biomarkers have been shown to stratify cardiovascular risk and assess response to therapy in large epidemiological studies. Currently, while general markers of inflammation are potentially useful in risk stratification, they are not adequate to identify the presence of CAD in an individual, due a lack of specificity for many markers. For similar reasons, the general markers of inflammation such as C-reactive protein (CRP) and erythrocyte sedimentation rate (ESR) have long been abandoned as specific diagnostic markers in other inflammatory diseases such as lupus and rheumatoid arthritis, although they remain important markers for risk stratification and response to therapy in clinical practice.

[0011] It is also possible that the heterogeneity of the individual response to environmental risk factors induces a high variability in ASCVD marker concentration. In this context, biological information carried by a single inflammatory protein cannot be sufficient in providing a comprehensive representation of the vascular inflammatory state, and may not be able to accurately identify the presence or extent of the disease.

### Pathophysiological Basis of Atherosclerosis

[0012] Atherosclerotic plaque consists of accumulated intracellular and extracellular lipids, smooth muscle cells, connective tissue, and glycosaminoglycans. The earliest detectable lesion of atherosclerosis is the fatty streak, consisting of lipid-laden foam cells, which are macrophages that have migrated as monocytes from the circulation into the subendothelial layer of the intima, which later evolves into the fibrous plaque, consisting of intimal smooth muscle cells surrounded by connective tissue and intracellular and extracellular lipids.

[0013] Interrelated hypotheses have been proposed to explain the pathogenesis of atherosclerosis. The lipid hypothesis postulates that an elevation in plasma LDL levels results in penetration of LDL into the arterial wall, leading to lipid accumulation in smooth muscle cells and in macrophages. LDL also augments smooth muscle cell hyperplasia and migration into the subintimal and intimal region in response to growth factors. LDL is modified or oxidized in this environment and is rendered more atherogenic. The modified or oxidized LDL is chemotactic to monocytes, promoting their migration into the intima, their early appearance in the fatty streak, and their transformation and retention in the subintimal compartment as macrophages. Scavenger receptors on the surface of macrophages facilitate the entry of oxidized LDL into these cells, transferring them into lipid-laden macrophages and foam cells. Oxidized LDL is also cytotoxic to endothelial cells and may be responsible for their dysfunction or loss from the more advanced lesion.

[0014] The chronic endothelial injury hypothesis postulates that endothelial injury by various mechanisms produces loss of endothelium, adhesion of platelets to subendothelium, aggregation of platelets, chemotaxis of monocytes and T-cell lymphocytes, and release of platelet-derived and monocyte-derived growth factors that induce migration of smooth muscle cells from the media into the intima, where they replicate, synthesize connective tissue and proteoglycans, and form a fibrous plaque. Other cells, e.g. macrophages, endothelial cells, arterial smooth muscle cells, also produce growth factors that can contribute to smooth muscle hyperplasia and extracellular matrix production.

[0015] Endothelial dysfunction includes increased endothelial permeability to lipoproteins and other plasma constituents, expression of adhesion molecules and elaboration of growth factors that lead to increased adherence of monocytes, macrophages and T lymphocytes. These cells may migrate through the endothelium and situate themselves within the subendothelial layer. Foam cells also release growth factors and cytokines that promote migration of smooth muscle cells and stimulate neointimal proliferation, continue to accumulate lipid and support endothelial cell dysfunction. Clinical and laboratory studies have shown that inflammation plays a major role in the initiation, progression and destabilization of atheromas.

[0016] The “autoimmune” hypothesis postulates that the inflammatory immunological processes characteristic of the very first stages of atherosclerosis are initiated by humoral and cellular immune reactions against an endogenous antigen. Human Hsp60 expression itself is a response to injury initiated by several stress factors known to be risk factors for atherosclerosis, such as hypertension. Oxidized LDL is another candidate for an autoantigen in atherosclerosis. Antibodies to oxLDL have been detected in patients with atherosclerosis, and they have been found in atherosclerotic lesions. T lymphocytes isolated from human atherosclerotic lesions have been shown to respond to oxLDL and to be a major autoantigen in the cellular immune response. A third autoantigen proposed to be associated with atherosclerosis is 2-Glycoprotein I (2GPI), a glycoprotein that acts as an anticoagulant in vitro. 2GPI is found in atherosclerotic plaques, and hyper-immunization with 2GPI or transfer of 2GPI-reactive T cells enhances fatty streak formation in transgenic atherosclerotic-prone mice.

[0017] Infections may contribute to the development of atherosclerosis by inducing both inflammation and autoimmunity. A large number of studies have demonstrated a role of infectious agents, both viruses (cytomegalovirus, herpes simplex viruses, enteroviruses, hepatitis A) and bacteria (C. pneumoniae, H. pylori, periodontal pathogens) in atherosclerosis. Recently, a new “pathogen burden” hypothesis has been proposed, suggesting that multiple infectious agents contribute to atherosclerosis, and that the risk of cardiovascular disease posed by infection is related to the number of pathogens to which an individual has been exposed. Of single micro-organisms, C. pneumoniae probably has the strongest association with atherosclerosis.

[0018] These hypotheses are closely linked and not mutually exclusive. Modified LDL is cytotoxic to cultured endothelial cells and may induce endothelial injury, attract monocytes and macrophages, and stimulate smooth muscle growth. Modified LDL also inhibits macrophage mobility, so that once macrophages transform into foam cells in the subendothelial space they may become trapped. In addition, regenerating endothelial cells (after injury) are functionally impaired and increase the uptake of LDL from plasma.

[0019] Atherosclerosis is characteristically silent until critical stenosis, thrombosis, aneurysm, or embolus supervenes. Initially, symptoms and signs reflect an inability of blood flow to the affected tissue to increase with demand, e.g. angina on exertion, intermittent claudication. Symptoms and signs commonly develop gradually as the atheroma slowly encroaches on the vessel lumen. However, when a major artery is acutely occluded, the symptoms and signs may be dramatic.

[0020] As mentioned above, currently, due to lack of appropriate diagnostic strategies, the first clinical presentation of more than half of the patients with coronary artery disease is either myocardial infarction or death. Further progress in prevention and treatment depends on the development of strategies focused on the primary inflammatory process in the vascular wall, which is fundamental in the etiology of atherosclerotic disease. Without good surrogate markers that accurately report the activity and/or extent of vessel wall disease, methods cannot be developed that completely define risk, monitor the effects of risk reduction toward primary disease amelioration, or develop new classes of therapies that target the vessel wall.

[0021] One promising approach is the identification of circulating proteins that reflect the degree and character of vascular inflammation. A number of immune modulatory proteins have been identified to have some value as surrogate markers, but such biomarkers have not been shown to add sufficient information to have clinical utility. This is due to: i) the failure to consider data on multiple markers measured in parallel, ii) the failure to integrate individual marker data with clinical data that modulates the levels of circulating proteins and obscures the informative patterns, iii) inherited genetic variation that contributes to expression levels of the genes encoding the markers and confounds the abundance measurements, and iv) a lack of information regarding specific immune pathways activated in ASCVD that would better inform biomarker choice. Finally, the prior art fails to provide effective diagnostic or predictive methods using measurements of a panel of circulating proteins.

### Unmet Clinical and Scientific Need

[0022] Thus, there is an unmet need for use in clinical medicine and biomedical research for improved tools to identify individuals with vascular inflammation and atherosclerotic cardiovascular disease. At present, although insights into mechanisms and circumstances of atherosclerosis are increasing, our methods for identifying high-risk patients and predicting the efficacy of prevention strategies remain inadequate. New approaches therefore are needed to better diagnose patients at risk; identification of patients with atherosclerotic disease can lead to initiation of much needed therapy that can lead to improved clinical outcomes. The present invention addresses these and other shortcomings of the prior art.

### SUMMARY OF THE INVENTION

[0023] This invention provides methods for detection of circulating protein expression for diagnosis, monitoring, and development of therapeutics, with respect to atherosclerotic conditions, including but not limited to conditions that lead to angina, unstable angina, acute coronary syndrome, myocardial infarction, and heart failure. Specifically, circulating proteins are identified and described herein that are differentially expressed in atherosclerotic patients, including but not limited to circulating inflammatory markers. Circulating inflammatory markers identified herein include MCP-1, MCP-2, MCP-3, MCP-4, eotaxin, IP-10, M-CSF, IL-3, TNFa, Ang-2, IL-5, IL-7, and IGF-1.

[0024] The detection of circulating levels of proteins identified herein, which are specifically produced in the vascular wall as a result of the atherosclerotic process, can classify patients as belonging to atherosclerotic conditions, including atherosclerotic disease, no disease, myocardial infarction, stable angina, treatment with medication, no treatment, and the like. Such classification can also be used in prediction of cardiovascular events and response to therapeutics; and are useful to predict and assess complications of cardiovascular disease.

[0025] In one embodiment of the invention, the expression profile of a panel of proteins is evaluated for conditions indicative of various stages of atherosclerosis and clinical sequelae thereof. Such a panel provides a level of discrimination not found with individual markers. In one embodiment, the expression profile is determined by measurements of protein concentrations or amounts.

[0026] Methods of analysis may include, without limitation, utilizing a dataset to generate a predictive model, and inputting test sample data into such a model in order to classify the sample according to an atherosclerotic classification, where the classification is selected from the group consisting of an atherosclerotic disease classification, a healthy classification, a vascular inflammation classification, a medication exposure classification, a no medication exposure classification, and a coronary calcium score classification, and classifying the sample according to the output of the process. In some embodiments, such a predictive model is used in classifying a sample obtained from a mammalian subject by obtaining a dataset associated with a sample, wherein the dataset comprises at least three, or at least four, or at least five protein markers selected from the group consisting of MCP1; MCP2; MCP3; MCP4; Eotaxin; IP10; MCSF; IL3; TNFa; Ang2; IL5; IL7; IGF1; IL10; INFγ; VEGF; MIPla; RANTES; IL6; IL8; ICAM; TIMP1; CCL19; TCA4/6kine/CCL21; CSF3; TRANCE; IL2; IL4; IL13; Il1b; MCP5; CCL9; CXCL1/GRO1; GROalpha; IL12; and Leptin. The data optionally includes a profile for clinical indicia; additional protein expression profiles; metabolic measures, genetic information, and the like.

[0027] A predictive model of the invention utilizes quantitative data from one or more sets of markers described herein. In some embodiments a predictive model provides for a level of accuracy in classification; i.e. the model satisfies a desired quality threshold. A quality threshold of interest may provide for an accuracy or AUC of a given threshold, and either or both of these terms (AUC; accuracy) may be referred to herein as a quality metric. A predictive model may provide a quality metric, e.g. accuracy of classification or AUC, of at least about 0.7, at least about 0.8, at least about 0.9, or higher. Within such a model, parameters may be appropriately selected so as to provide for a desired balance of sensitivity and selectivity.

[0028] In other embodiments, analysis of circulating proteins is used in a method of screening biologically active agents for efficacy in the treatment of atherosclerosis. In such methods, cells associated with atherosclerosis, e.g. cells of the vessel wall, etc., are contacted in culture or in vivo with a candidate agent, and the effect on expression of one or more of the markers, e.g. a panel of markers, is determined. In another embodiment, analysis of differential expression of the above circulating proteins is used in a method of following therapeutic regimens in patients. In a single time point or a time course, measurements of expression of one or more of the markers, e.g. a panel of markers, is determined when a patient has been exposed to a therapy, which may include a drug, combination of drugs, non-pharmacologic intervention, and the like.

[0029] In another method, relative quantitative measures of 3 or more of atherosclerosis associated proteins identified herein are used to diagnose or monitor atherosclerotic disease in an individual. This panel of proteins identified herein can further include other clinical indicia; additional protein expression profiles; metabolic measures, genetic information, and the like.

[0030] In another embodiment, the invention includes methods for classifying a sample obtained from a mammalian subject by obtaining a dataset associated with a sample, wherein the dataset comprises quantitative data for at least three, or at least four, or at least five, or at least six, or at least seven, or at least eight, or at least nine, or more than nine protein markers selected from the group consisting of MCP-1, MCP-2, MCP-3, MCP-4, eotaxin, IP-10, M-CSF, IL-3, TNFa, Ang-2, IL-5, IL-7, and IGF-1, inputting the data into an analytical process that uses the data to classify the sample, where the classification is selected from the group consisting of an atherosclerotic disease classification, a healthy classification, a vascular inflammation classification, a medication exposure classification, a no medication exposure classification, and a coronary calcium score classification, and classifying the sample according to the output of the process.

[0031] In another embodiment, the invention includes methods for classifying a sample obtained from a mammalian subject by obtaining a dataset associated with a sample, wherein the dataset comprises quantitative data for at least three, or at least four, or at least five, or at least six, protein markers that each shows a correlation between a circulating protein concentration and an atherosclerotic vascular tissue RNA concentration, inputting the data into an analytical process that uses the data to classify the sample, where the classification is selected from the group consisting of an atherosclerotic disease classification, a healthy classification, a vascular inflammation classification, a medication exposure classification, a no medication exposure classification, and a coronary calcium score classification, and classifying the sample according to the output of the process.

### BRIEF DESCRIPTION OF THE SEVERAL VIEWS OF THE DRAWINGS

[0032] FIG. 1. Time-dependent serum inflammatory protein expression during progression of atherosclerosis in apolipoprotein (apo)E-deficient mice on high-fat diet. The heat map is a graphic representation of the serum concentration levels with individual serum samples arranged along the x-axis and protein markers along the y-axis. Values represent serum protein expression levels from apoe-deficient mice at baseline (T00; n=5) and at 10 (T10; n=5), 16 (T16; n=4), 24 (T24; n=5), and 40 wk (T40; n=5) on high-fat diet. Please note that for the 16-wk time point, values were derived from a 2nd independent data set.

[0033] FIG. 2. Circulating inflammatory protein expression levels in apoE-deficient mice and in control mice. Heat map is graphic representation of row normalized expression values. Values represent average circulating protein expression levels (log2) from replicate apoe-mice at baseline (T00)(n=9) and at 40 weeks (T40) on high fat diet (n=9), as well as C57B1/6 (n=5) and C3H/HeJ (n=3) mice at baseline and at 40 weeks on high fat diet (n=5, 5 respectively). Whereas apoE-deficient mice on high fat diet have the highest levels of inflammatory markers, C3H/HeJ mice have the lowest levels despite being on high fat diet as well. N-way ANOVA was used to identify with statistically significant variation among the various conditions. In far right column, p-values reported do not take into account possible interaction between diet, strain, and time. Effects of these factors and their interaction with each other are discussed in the text.

[0034] FIG. 3. Proteomic signature patterns of serum inflammatory markers in classification of atherosclerosis in mice. A: identification of the atherosclerosis classification protein subset. Various classification algorithms, including prediction analysis for microarrays (PAM), recursive feature elimination (RFE), support vector machine (SVM), and ANOVA, were used to rank a subset of markers based on their ability to accurately discriminate between mice with 4 different stages of atherosclerotic disease (apoE-deficient mice at baseline and 10, 24, and 40 wk on high-fat diet). A number of these markers were ranked in all classification algorithms. B: classification accuracy of mouse atherosclerotic disease (confusion matrix). To determine the accuracy of mouse classifier proteins in predicting disease severity, we used the top-ranking protein markers identified earlier (Ccl21, Ccl9, Csf3, Tnfsf11, Vegfa, Ccl11, Ccl2). The SVM algorithm was utilized for cross-validation of mouse experiments grouped on the basis of stages of disease. Accuracy of classification was determined with a 1,000-step N-fold cross-validation method, with 25% of experiments employed as the test group and the rest as the training group. Results are represented in tabular fashion with the confusion matrix as described in the Methods section. The notation “TRUE” refers to “Actual Disease State,” whereas “Predicted” refers to “Predicted Disease State.” C: classification of an independent data set. Using the SVM algorithm, we can classify an independent data set (“test”) to closest time point from the original set of experiments (“known”). The known experiments include the 4 time points in our original analysis from which the set of protein classifiers was derived. The independent set of experiments was derived from the 16-wk time point, which was not included in the original set. SVM scores (affinity) for each experiment, based on one-vs.-all comparisons, are represented graphically in the heat map. The protein profile of the 16-wk time point correlated more closely with the 10-wk time point of the original data set.

[0035] FIG. 4. Correlation between serum level and vascular gene expression of top classifier markers. A: to investigate the disease-related gene expression for a subset of these serum markers, we studied their temporal gene expression in aortas of mice from which the sera were obtained. Using quantitative real-time RT-PCR (qRT-PCR), we were able to correlate the time-dependent serum protein levels of these markers with their vascular wall gene expression. Pearson correlation was determined for log10-normalized average expression ratios of serum protein levels and aortic gene expression values. The average ratio of protein levels was determined by protein microarray at each time point divided by levels for apoE deficient mice at baseline (n=4-9). Average ratio of gene expression levels was determined by replicate qRT-PCR reaction at each time point divided by values obtained for apoe-deficient mice at baseline. Please note that, for the 16-wk time point, the values were derived from a separate independent data set. B: correlation matrix summary table for Pearson correlation values comparing normalized average ratios of serum protein level, vascular gene expression, and time on high-fat diet (log10 of no. of wk on diet). Correlations were considered significant at 0.05 (2 tailed).

[0036] FIG. 5. Clinical characteristics of the subjects. Nominal variables (*) are expressed as count (%), and continuous variables (†) as median (interquartiles range). ‡ Comparisons are made by Pearson Chi-square or Mann-Whitney U test, as appropriate. Significance has been calculated by Monte Carlo approach, based on 10000 sampled comparisons. BP (Blood Pressure); FH (Family History); ACEI (Angiotensin-Converting-Enzyme Inhibitors); BB (Beta Blockers); CCB (Calcium-Channel Blockers); AB (Alpha Blockers); ASA (Acetyl Salicylic Acid); BMI (Body Mass Index); DBP (Diastolic Blood Pressure); SBP (Systolic Blood Pressure); HR (Heart Rate); CRP (C-Reactive Protein).

[0037] FIG. 6. Serum chemokine profiles in coronary artery disease patients and healthy controls, before and after adjustment for clinical characteristics. Data are expressed as geometrical mean (95% CI). Adjustment has been performed by GLM multivariate analysis and comparisons on adjusted means by t-test. * Model 1 is adjusted for age and waist circumference; † Model 2 is adjusted as Model 1 plus treatment (ACE inhibitors, statins, and aspirin).

[0038] FIG. 7. Two dimensional hierarchical clustering of clinical variables and cases versus controls.

[0039] FIG. 8. Principal component analysis demonstrating that 60-70% of the variability observed within the subjects could be explained by chemokines, insulin resistance profile, and a subset of other clinical variables such as hypertension and hyperlipidemia, with markers of inflammation being the dominant factor.

[0040] FIG. 9. Table showing Support Vector Machine (SVM) and Recursive Feature Elimination (RFE) used to determine optimal number of ranked variables to classify experiments into correct groups at minimal error rate. Optimal error rate or misclassification is calculated by 1000-times reiterated cross-validation, with 25% of experiments as test group and remaining experiments as training group.

[0041] FIG. 10. ROC curves.

[0042] FIG. 11. Table showing Logistic Regression models to predict coronary artery disease. Models: 1) Stepwise forward selection without missing values estimation; 2) Stepwise forward selection with missing data estimation by conditional means; 3) Stepwise forward selection of clinical variables and chemokine score. Independent variables: Age, Gender, Diastolic blood pressure (DBP), Systolic blood pressure (SBP), Heart rate, Plasma insulin, C-Reactive Protein, and chemokines (models 1 and 2: Eotaxin, IP-10, MCP-1, MCP-2, MCP-3, MCP-4, and MIP-1alpha (; model 3: Chemokine score).

[0043] FIG. 12. Expected AUC value and S.E. for a series of LDA models involving an increasing number of terms in the order given in the figure.

[0044] FIG. 13. Expected AUC value and S.E. for a series of Logistic Regression models involving an increasing number of terms in the order given in the figure.

[0045] FIG. 14. LDA model predictions with MCP-1 marker excluded from the set of available predictive markers. The new model utilizes Ang-2, IGF-1 and M-CSF as alternate marker combination for exceeding the AUC>0.75 threshold.

[0046] FIG. 15a. Marker selection for a Logistic Regression model using Akaike Information Criterion (AIC).

[0047] FIG. 15b: Expected AUC value and S.E. for a series of Logistic Regression models involving an increasing number of terms in the order given in the figure (=inverse order of term removal from the complete model by applying the AIC criterion in the marker selection process).

[0048] FIG. 16. Logistic regression model including both clinical variables and biological markers.

[0049] FIG. 17. Logistic regression model including alternate clinical variables and biological markers. A model including “Beta Blockers” (DC512) and “Statins” (DC3005) and MCP-4 produces an expected value of AUC in excess of 0.85.

[0050] FIG. 18. Boxplots of value distribution of the first discriminant variate for the three groups: “Untreated,” “ACE or Statins,” and “ACE and Statins.”

### DETAILED DESCRIPTION OF THE INVENTION

[0051] Definitions

[0052] Terms used in the claims and specification are defined as set forth below unless otherwise specified.

[0053] The term “ameliorating” refers to any therapeutically beneficial result in the treatment of a disease state, e.g., an atherosclerotic disease state, including prophylaxis, lessening in the severity or progression, remission, or cure thereof.

[0054] The term “mammal” as used herein includes both humans and non-humans and include but is not limited to humans, non-human primates, canines, felines, murines, bovines, equines, and porcines.

[0055] The term percent “identity,” in the context of two or more nucleic acid or polypeptide sequences, refer to two or more sequences or subsequences that have a specified percentage of nucleotides or amino acid residues that are the same, when compared and aligned for maximum correspondence, as measured using one of the sequence comparison algorithms described below (e.g., BLASTP and BLASTN or other algorithms available to persons of skill) or by visual inspection. Depending on the application, the percent “identity” can exist over a region of the sequence being compared, e.g., over a functional domain, or, alternatively, exist over the full length of the two sequences to be compared.

[0056] For sequence comparison, typically one sequence acts as a reference sequence to which test sequences are compared. When using a sequence comparison algorithm, test and reference sequences are input into a computer, subsequence coordinates are designated, if necessary, and sequence algorithm program parameters are designated. The sequence comparison algorithm then calculates the percent sequence identity for the test sequence(s) relative to the reference sequence, based on the designated program parameters.

[0057] Optimal alignment of sequences for comparison can be conducted, e.g., by the local homology algorithm of Smith & Waterman, Adv. Appl. Math. 2:482 (1981), by the homology alignment algorithm of Needleman & Wunsch, J. Mol. Biol. 48:443 (1970), by the search for similarity method of Pearson & Lipman, Proc. Nat'l. Acad. Sci. USA 85:2444 (1988), by computerized implementations of these algorithms (GAP, BESTFIT, FASTA, and TFASTA in the Wisconsin Genetics Software Package, Genetics Computer Group, 575 Science Dr., Madison, Wis.), or by visual inspection (see generally Ausubel, F M, et al., Current Protocols in Molecular Biology, 4, John Wiley & Sons, Inc., Brooklyn, N.Y., A.1E.1-A.1F.11, 1996-2004).

[0058] One example of an algorithm that is suitable for determining percent sequence identity and sequence similarity is the BLAST algorithm, which is described in Altschul et al., J. Mol. Biol. 215:403-410 (1990). Software for performing BLAST analyses is publicly available through the National Center for Biotechnology Information (www.ncbi.nlm.nih.gov/).

[0059] The term “sufficient amount” means an amount sufficient to produce a desired effect, e.g., an amount sufficient to alter a protein expression profile.

[0060] The term “therapeutically effective amount” is an amount that is effective to ameliorate a symptom of a disease. A therapeutically effective amount can be a “prophylactically effective amount” as prophylaxis can be considered therapy.

[0061] TP: true positive

[0062] TN: true negative

[0063] FP: false positive

[0064] FN: false negative

[0065] N: total number of negative samples

[0066] P: total number of positive samples

[0067] A: total number of samples

[0068] Accuracy=(TP+TN)/A

[0069] Mean CV error=Mean Misclassification error=1−Mean Accuracy

[0070] Sensitivity=TP/P=TP/(TP+FN)

[0071] Specificity=TN/N=TN/(TN+FP)

[0072] Abbreviations used in this application include the following: CAD=coronary artery disease; MIP1a=MIP1alpha; LDA=Linear Discriminant Analysis, MI=myocardial infarction; ASCVD=atherosclerotic cardiovascular disease.

[0073] It must be noted that, as used in the specification and the appended claims, the singular forms “a,” “an,” and “the” include plural referents unless the context clearly dictates otherwise.

[0074] Atherosclerosis (also referred to as arteriosclerosis, atheromatous vascular disease, arterial occlusive disease) as used herein, refers to a cardiovascular disease characterized by plaque accumulation on vessel walls and vascular inflammation. The plaque consists of accumulated intracellular and extracellular lipids, smooth muscle cells, connective tissue, inflammatory cells, and glycosaminoglycans. Inflammation occurs in combination with lipid accumulation in the vessel wall, and vascular inflammation is with the hallmark of atherosclerosis disease process.

[0075] Myocardial infarction is an ischemic myocardial necrosis usually resulting from abrupt reduction in coronary blood flow to a segment of myocardium. In the great majority of patients with acute MI, an acute thrombus, often associated with plaque rupture, occludes the artery that supplies the damaged area. Plaque rupture occurs generally in previously partially obstructed by an atherosclerotic plaque enriched in inflammatory cells. Altered platelet function induced by endothelial dysfunction and vascular inflammation in the atherosclerotic plaque presumably contributes to thrombogenesis. Myocardial infarction can be classified into ST-elevation and non-ST elevation MI (also referred to as unstable angina). In both forms of myocardial infarction, there is myocardial necrosis. In ST-elevation myocardial infraction there is transmural myocardial injury which leads to ST-elevations on electrocardiogram. In non-ST elevation myocardial infarction, the injury is sub-endocardial and is not associated with ST segment elevation on electrocardiogram. Myocardial infarction (both ST and non-ST elevation) represents an unstable form of atherosclerotic cardiovascular disease. Acute coronary syndrome encompasses all forms of unstable coronary artery disease.

[0076] Angina refers to chest pain or discomfort resulting from inadequate blood flow to the heart. Angina can be a symptom of atherosclerotic cardiovascular disease. Angina may be classified as stable, which follows a regular chronic pattern of symptoms. Unlike the unstable forms of atherosclerotic vascular disease. The pathophysiological basis of stable atherosclerotic cardiovascular disease is also complicated but is biologically distinct from the unstable form. Generally stable angina is not myocardial necrosis.

[0077] Heart failure can occur as a result of myocardial dysfunction caused by myocardial infraction.

[0078] Several features of the current approach should be noted. Atherosclerosis and related conditions are diagnosed through a blood based test that assesses the presence of one or a panel of protein markers. The markers include MCP-1, MCP-2, MCP-3, MCP-4, eotaxin, IP-10, M-CSF, IL-3, TNFa, Ang-2, IL-5, IL-7, and IGF-1. These markers have been shown to be specifically produced in the vascular wall in association with the atherosclerotic process. In some embodiments, such a predictive model utilizes quantitative data obtained from circulating markers that include MCP1; MCP2; MCP3; MCP4; Eotaxin; IP10; MCSF; IL3; TNFa; Ang2; IL5; IL7; IGF1; IL10; INFγ; VEGF; MIP1a; RANTES; IL6; IL8; ICAM; TIMP1; CCL19; TCA4/6kine/CCL21; CSF3; TRANCE; IL2; IL4; IL13; Il1b; MCP5; CCL9; CXCL1/GRO1; GROalpha; IL12; and Leptin. Other circulating markers of interest include sVCAM; sICAM-1; E-selectin; P-selection; interleukin-6, interleukin-18; creatine kinase; LDL, oxLDL, LDL particle size, Lipoprotein(a); troponin I, troponin T; LPLA2; CRP; HDL, Triglyceride, insulin, BNP (brain naturetic peptide), fractalkine, osteopontin, osteoprotegerin, oncostatin-M, Myeloperoxidase, ADMA, PAI-1 (plasminogen activator inhibitor), SAA (circulating amyloid A), t-PA (tissue-type plasminogen activator), sCD40 ligand, fibrinogen, homocysteine, D-dimer, leukocyte count and may further include a variety of additional markers as described herein, including clinical indicia, metabolic measures, genetic assays, and additional circulating markers.

[0079] In certain embodiments of the invention, a dataset for classification is obtained from a patient sample, wherein the dataset comprises quantitative data for at least three protein markers selected from the group consisting of MCP-1, MCP-2, MCP-3, MCP-4, eotaxin, IP-10, M-CSF, IL-3, TNFa, Ang-2, IL-5, IL-7, and IGF-1. The at least three protein markers may comprise a marker set selected from the group consisting of MCP-1, IGF-1, TNFa; MCP-1, IGF-1, M-CSF; ANG-2, IGF-1, M-CSF; and MCP-4, IGF-1, M-CSF. Where the dataset comprises quantitative data from at least four protein markers, the at least four protein markers may be selected from the group consisting of MCP-1, MCP-2, MCP-3, MCP-4, eotaxin, IP-10, M-CSF, IL-3, TNFa, Ang-2, IL-5, IL-7, and IGF-1; MCP-1, IGF-1, TNFa, IL-5; MCP-1, IGF-1, M-CSF, MCP-2; ANG-2, IGF-1, M-CSF, IL-5; MCP-1, IGF-1, TNFa, MCP-2; and MCP-4, IGF-1, M-CSF, IL-5. Where the dataset comprises quantitative data from at least five markers, The at least five markers may comprise a marker set selected from the group consisting of MCP-1, MCP-2, MCP-3, MCP-4, eotaxin, IP-10, M-CSF, IL-3, TNFa, Ang-2, IL-5, IL-7, and IGF-1; MCP-1, IGF-1, TNFa, IL-5, M-CSF; MCP-1, IGF-1, M-CSF, MCP-2, IP-10; ANG-2, IGF-1, M-CSF, IL-5, TNFa; MCP-1, IGF-1, TNFa, MCP-2, IP-10; MCP-4, IGF-1, M-CSF, IL-5, TNFa; and MCP-4, IGF-1, M-CSF, IL-5, MCP-2.

[0080] In another embodiment of the invention, at least two, at least three, at least four, at least five or more markers are selected from M-CSF, eotaxin, IP-10, MCP-1, MCP-2, MCP-3, MCP-4, IL-3, IL-5, IL-7, IL-8, MIP1a, TNFa, and RANTES.

[0081] The identification of atherosclerosis associated circulating proteins provides diagnostic and prognostic methods, which detect the occurrence of a disorder, e.g. coronary arterial disease, atherosclerosis, etc., particularly where such a disorder is indicative of a propensity for myocardial infarction, heart failure, etc.; or assess an individual's susceptibility to such disease, by detecting altered levels of the identified circulating proteins. The methods also include screening for efficacy of therapeutic agents and methods; disease staging and classification; and the like. Early detection can be used to determine the occurrence of developing disease, thereby allowing for intervention with appropriate preventive or protective measures.

TABLE 1

| | | | | | | | | | |
|---|---|---|---|---|---|---|---|---|---|
| | | | | Human | | | | | |
| | | | | polynucleotide | Human | Mouse | Mouse | | Mouse |
| | | | Locus | accession | polynucleotide | polynucleotide | polynucleotide | Human protein | protein |
| Protein | Common Alias | Other names | Link | (refseq) | accession (related) | accession (refseq) | accession (related) | accession | accession |

TABLE 1A

| | | | | | | | | | |
|---|---|---|---|---|---|---|---|---|---|
| CCL2 | \|\|CCL2\|\|SCYA2\|\|MCP1\|\|MONOCYTE | Chemokine(C—C | 6347 | NM_002982 | AC005549, | NM_011333 | AJ238892, | NP_002973, | NP_035463, |
| | CHEMOTACTIC | motif) ligand 2 | | (SEQ ID NO: 1) | AF519531, | (SEQ ID NO: 2) | AL626807, J04467, | P13500, | P10148, |
| | PROTEIN 1\|\|SMALL | | | | AY357296, D26087, | | M19681, | Q6UZ82 | Q5SVU3 |
| | INDUCIBLE CYTOKINE | | | | M28225, M31626, | | CB571537, | (SEQ ID NOS | (SEQ ID |
| | A2\|\|chemokine (C—C motif) | | | | M37719, X60001, | | AF065929, | 3-5) | NOS 6-8) |
| | ligand 2\|\|MONOCYTE | | | | Y18933, AV733621, | | AF065930, | | |
| | CHEMOTACTIC AND | | | | BC009716, | | AF065931, | | |
| | ACTIVATING | | | | BG530064, | | AF065932, | | |
| | FACTOR\|\|CHEMOKINE, | | | | BT007329, M24545, | | AF065933, | | |
| | CC MOTIF, LIGAND | | | | M26683, M28226, | | AK132590, | | |
| | 2\|\|MCAF CORONARY | | | | S69738, S71513, | | AK150937, | | |
| | ARTERY DISEASE, | | | | X14768, BU570769, | | AK151789, | | |
| | MODIFIER | | | | | | AK153443, | | |
| | OF\|\|CORONARY | | | | | | AK153468, | | |
| | ARTERY DISEASE, | | | | | | AK153520, | | |
| | DEVELOPMENT OF, IN | | | | | | BC055070, | | |
| | HIV\|\| | | | | | | CT010187, J04467 | | |
| CCL8 | \|\|CCL8\|\|MCP2\|\|SCYA8\|\|MONOCYTE | Chemokine (C—C | 6355 | NM_005623 | AC011193, X99886, | NM_021443 | AL713860, | NP_005614, | NP_067418, |
| | CHEMOTACTIC | motif) ligand 8 | | (SEQ ID NO: 9) | Y18047, Y16645, | (SEQ ID NO: 10) | AK007942, | P80075 | Q5SR19, |
| | PROTEIN 2\|\|chemokine (C—C | | | | Y10802 | | AB023418, | (SEQ ID NOS | Q9Z121 |
| | motif) ligand | | | | | | AI604201 | 11-12) | (SEQ ID |
| | 8\|\|CHEMOKINE, CC | | | | | | | | NOS 13-15) |
| | MOTIF, LIGAND | | | | | | | | |
| | 8\|\|SMALL INDUCIBLE | | | | | | | | |
| | CYTOKINE SUBFAMILY | | | | | | | | |
| | A, MEMBER 8\|\| | | | | | | | | |
| CCL7 | \|\|SCYA7\|\|CCL7\|\|MCP3\|\|MONOCYTE | Chemokine (C—C | 6354 | NM_006273 | AC005549, X72309, | NM_013654 | AL626807, | NP_006264, | NP_038682, |
| | CHEMOTACTIC | motif) ligand 7 | | (SEQ ID NO: | CA306760, | (SEQ ID NO: 17) | AL645596, | P80098, | Q03366, |
| | PROTEIN 3\|\|SMALL | | | 16) | AF043338, | | X70058, BF142314, | Q569J6, | Q5SVU0 |
| | INDUCIBLE CYTOKINE | | | | BC070240, | | AF128193, | Q7Z7Q8 | (SEQ ID |
| | A7\|\|chemokine (C—C motif) | | | | BC09235, | | AF128194, | (SEQ ID NOS | NOS 22-24) |
| | ligand 7\|\|CHEMOKINE, | | | | BC112258, | | AK078824, | 18-21) | |
| | CC MOTIF, LIGAND 7\|\| | | | | BC112260, X71087 | | BC061126, L04694, | | |
| | | | | | | | S71251, Z12297 | | |
| CCL13 | \|\|NCC1\|\|SCYA13\|\|MCP4\|\|CCL13\|\| | Chemokine (C—C | 6357 | NM_005408 | AC002482, | NM_010779 | AC163646, | NP_005399 | P21812 |
| | NEW CC | motif) ligand 13 | | (SEQ ID NO: | AC011193, | (SEQ ID NO: 26) | M55616, | (SEQ ID NO: | (SEQ ID |
| | CHEMOKINE | | | 25) | AJ000979, | | AB051900, | 27) | NO: 28) |
| | 1\|\|MONOCYTE | | | | AJ001634, | | AK144385, | | |
| | CHEMOTACTIC | | | | BC008621, | | AY007569, | | |
| | PROTEIN 4\|\|chemokine (C—C | | | | BT007385, | | BC026198, | | |
| | motif) ligand | | | | CR450337, U46767, | | M55617, X68804 | | |
| | 13\|\|CHEMOKINE, CC | | | | U59808, X98306, | | | | |
| | MOTIF, LIGAND | | | | Z77650, Z77651, | | | | |
| | 13\|\|SMALL INDUCIBLE | | | | U59808, BM991948 | | | | |
| | CYTOKINE SUBFAMILY | | | | | | | | |
| | A, MEMBER 13\|\| | | | | | | | | |
| CCL11 | \|\|SCYA11\|\|CCL11\|\|EOTAXIN\|\| | Chemokine (C—C | 6356 | NM_002986 | AB063614, | NM_011330 | AL645596, | NP_002977, | NP_035460, |
| | SMALL INDUCIBLE | motif) ligand 11 | | (SEQ ID NO: | AB063616, | (SEQ ID NO: 30) | U77462, | P51671, | P48298, |
| | CYTOKINE | | | 29) | AC005549, U34780, | | AF128205, | Q6I9T4 | Q5SVB5 |
| | A11\|\|CHEMOKINE, CC | | | | U46572, Z92709, | | AF128206, | (SEQ ID NOS | (SEQ ID |
| | MOTIF, LIGAND | | | | BC017850, | | AF128207, | 31-33) | NOS 34-36) |
| | 11\|\|chemokine (C—C motif) | | | | BF197516, | | AF128208, | | |
| | ligand 11\|\|SMALL | | | | CR457421, D49372, | | AF128209, | | |
| | INDUCIBLE CYTOKINE | | | | U46573, Z69291, | | AK009307, | | |
| | SUBFAMILY A, | | | | Z75668, Z75669, | | AK010146, | | |
| | MEMBER 11\|\| | | | | BG485598 | | BC027521, | | |
| | | | | | | | U26426, U40672, | | |
| | | | | | | | AA711712, | | |
| | | | | | | | Mm4686 | | |
| CXCL10 | \|\|INP10\|\|CXCL10\|\|SCYB10\|\| | Chemokine | 3627 | NM_001565 | AC112719, | NM_021274 | AC109603, | NP_001556, | NP_067249, |
| | IP10\|\|INTERFERON- | (C—X—C motif) | | (SEQ ID NO: | BC021117, M27087, | (SEQ ID NO: 38) | AC122365, L07417, | P02778 | P17515, |
| | GAMMA-INDUCED | ligand 10 | | 37) | M37435, M64592, | | M86830, | (SEQ ID NOS | Q548V9 |
| | FACTOR\|\|INTERFERON- | | | | M76453, U22386, | | AF227743, | 39-40) | (SEQ ID |
| | GAMMA-INDUCIBLE | | | | X05825, BC010954, | | AJ243095, | | NOS 41-43) |
| | PROTEIN 10\|\|MOB1, | | | | X02530 | | AK144279, | | |
| | MOUSE, HOMOLOG | | | | | | AK146144, | | |
| | OF\|\|CHEMOKINE, CXC | | | | | | AK150380, | | |
| | MOTIF, LIGAND | | | | | | AK150765, | | |
| | 10\|\|chemokine (C—X—C | | | | | | AK150987, | | |
| | motif) ligand 10\|\|SMALL | | | | | | AK151210, | | |
| | INDUCIBLE CYTOKINE | | | | | | AK151248, | | |
| | SUBFAMILY B, | | | | | | AK151415, | | |
| | MEMBER 10\|\| | | | | | | AK151534, | | |
| | | | | | | | AK152234, | | |
| | | | | | | | AK152568, | | |
| | | | | | | | AK152814, | | |
| | | | | | | | AK152838, | | |
| | | | | | | | AK152924, | | |
| | | | | | | | AK153181, | | |
| | | | | | | | AK156907, | | |
| | | | | | | | AK157130, | | |
| | | | | | | | AK157139, | | |
| | | | | | | | AK157589, | | |
| | | | | | | | AK157678, | | |
| | | | | | | | AK172540, | | |
| | | | | | | | BC030067, | | |
| | | | | | | | BC057150, | | |
| | | | | | | | M33266, M86829, | | |
| | | | | | | | BC057150 | | |
| CSF1 | \|\|CSF1\|\|MCSF\|\|MGC31930\|\| | Colony | 1435 | NM_000757, | AL450468, M11038, | NM_007778 | AC140786, | NP_00748, | NP_031804, |
| | COLONY-STIMULATING | stimulating factor | | NM_172210, | M11295, M11296, | (SEQ ID NO: 48) | M81316, AI323836, | NP757349, | P07141 |
| | FACTOR 1\|\|COLONY- | 1 (macrophage) | | NM_172211, | X06106, BC021117, | | AK136808, | NP757350, | (SEQ ID |
| | STIMULATING FACTOR, | | | NM172212 | M27087, M37435, | | AK138489, | NP757351, | NOS 57-58) |
| | MACROPHAGE- | | | (SEQ ID NOS | M64592, M76453, | | AK154261, | P09603, | |
| | SPECIFIC\|\|macrophage | | | 44-47) | U22386, X05825, | | AK154872, | Q5VVF2, | |
| | colony stimulating | | | | BC021117 | | AK160995, | Q5VVF3, | |
| | factor\|\|Colony stimulating | | | | | | AK166370, | Q5VVF4 | |
| | factor 1 | | | | | | AK170154, | (SEQ ID NOS | |
| | (macrophage)\|\|colony | | | | | | BC025593, | 49-56) | |
| | stimulating factor 1 isoform | | | | | | BC066187, | | |
| | a precursor\|\|colony | | | | | | BC066200, | | |
| | stimulating factor 1 isoform | | | | | | BC066205, | | |
| | c precursor\|\|colony | | | | | | BG067715, | | |
| | stimulating factor 1 isoform | | | | | | BG080688, | | |
| | b precursor\|\| | | | | | | M15692, M21149, | | |
| | | | | | | | M21952, S78392, | | |
| | | | | | | | X05010, M21952 | | |
| IL3 | \|\|IL3\|\|MULTI- | Interleukin 3 | 3562 | NM_000588 | AC004511, | NM_010556 | AL596103, | NP_000579, | P01586, |
| | CSF\|\|Interleukin 3 (colony- | (colony- | | (SEQ ID NO: | AC034228, | (SEQ ID NO: 60) | K03233, M14394, | P08700, | K01850, |
| | stimulating factor, | stimulating | | 59) | AF365976, | | M20128, X02732, | Q6GS87, | Q5X77 |
| | multiple)\|\| | factor, multiple) | | | BC066272, | | AK153634, | Q6NZ78, | (SEQ ID |
| | | | | | BC066273, | | K01668, K01850, | Q6NZ79 | NOS 66-68) |
| | | | | | BC066274, | | A02046 | (SEQ ID NOS | |
| | | | | | BC066275, | | | 61-65) | |
| | | | | | BC066276, | | | | |
| | | | | | BC069472, M14743, | | | | |
| | | | | | M17115, M20137 | | | | |
| TNF | \|\|CACHECTIN\|\|TNFA\|\|TNF\|\| | Tumor necrosis | 7124 | NM_000594 | AB088112, | NM_013693 | AB039224, | NP_000585, | NP_038721, |
| | TNF, MACROPHAGE- | factor (TNF | | (SEQ ID NO: | AB202113, | (SEQ ID NO: 70) | AB039225, | P01375, | P06804 |
| | DERIVED\|\|TNF, | superfamily, | | 69) | AF129756, | | AB039226, | Q5RT83, | (SEQ ID |
| | MONOCYTE- | member 2) | | | AJ249755, | | AB039227, | Q5STB3, | NOS 76-77) |
| | DERIVED\|\|TUMOR | | | | AJ270944, | | AB039228, | Q9UBM5 | |
| | NECROSIS FACTOR, | | | | AL662801, | | AB039229, | (SEQ ID NOS | |
| | ALPHA\|\|tumor necrosis | | | | AL662847, | | AB039230, | 71-75) | |
| | factor (TNF superfamily, | | | | AL929587, | | AB039231, | | |
| | member 2)\|\| | | | | AY066019, | | AB039232, | | |
| | | | | | AY214167, | | AF109719, | | |
| | | | | | AY799806, | | CR974444, | | |
| | | | | | BA000025, | | D84196, D84199, | | |
| | | | | | BX248519, M16441, | | L22359, L22360, | | |
| | | | | | M26331, X02910, | | L22361, L22362, | | |
| | | | | | Y14768, Z15026, | | L22363, L22364, | | |
| | | | | | AF043342, | | L22365, M20155, | | |
| | | | | | AF098751, | | M38296, U06950, | | |
| | | | | | AJ227911, | | U68414, Y00467, | | |
| | | | | | AJ251878, | | AK153319, | | |
| | | | | | AJ251879, | | AK153800, | | |
| | | | | | BC028148, | | AK154223, | | |
| | | | | | BI908079, M10988, | | AK155964, | | |
| | | | | | M35592, X01394, | | AY423855, | | |
| | | | | | AF043342, BC028148, | | M11731, M13049, | | |
| | | | | | M10988, X01394 | | X02611, | | |
| ANGPT2 | \|\|ANG2\|\|angiopoietin- | Angiopoietin 2 | 285 | NM_001147 | AC018398, | NM_007426 | AC122206, | NP_001138, | NP_031452, |
| | 2B\|\|Tie2- | | | (SEQ ID NO: | AY563557, | (SEQ ID NO: 79) | AC129567, | O15123, | O35608 |
| | ligand\|\|ANGPT2\|\|AGPT2\|\|angiopoietin- | | | 78) | AB009865, | | AF004326, | Q9H4C0, | (SEQ ID |
| | 2a\|\|Angiopoietin 2\|\| | | | | AF004327, | | AK019860, | Q9H4C1, | NOS 85-86) |
| | | | | | AF187858, | | AK048622, | Q9HBP3 | |
| | | | | | AF218015, | | AK143974, | (SEQ ID NOS | |
| | | | | | AJ289780, | | AK156132, | 80-84) | |
| | | | | | AJ289781, | | AK186615, | | |
| | | | | | AK075219, | | BC027216 | | |
| | | | | | BC022490, | | | | |
| | | | | | CR620685 | | | | |
| IL5 | \|\|EDF\|\|IL5\|\|EOSINOPHIL | Interleukin 5 | 3567 | NM_000879 | AC116366, | NM_010558 | AC084392, | NP_000870, | NP_034688, |
| | DIFFERENTIATION | (colony- | | (SEQ ID NO: | AF353265, J02971, | (SEQ ID NO: 88) | AL645741, | P05113 | P04401, |
| | FACTOR\|\|Interleukin 5 | stimulating | | 87) | J03478, X12706, | | D14461, X04601, | (SEQ ID NOS | Q5SV01 |
| | (colony-stimulating factor, | factor, | | | BC066279, | | X06270 | 89-90) | (SEQ ID |
| | eosinophil)\|\| | eosinophil) | | | BC066280, | | | | NOS 91-93) |
| | | | | | BC066281, | | | | |
| | | | | | BC066282, | | | | |
| | | | | | BC069137, X04688, | | | | |
| | | | | | X12705 | | | | |
| IL7 | \|\|IL7\|\|Interleukin 7\|\| | Interleukin 7 | 3574 | NM_000880 | AC083837, M29053, | NM_008371 | AC125373, | NP_000871, | NP_032397, |
| | | | | (SEQ ID NO: | AB102879, | (SEQ ID NO: 95) | M29054, M29055, | P13232, | P10168, |
| | | | | 94) | AB102880, | | M29056, M29057, | Q5FBX5, | Q544C8, |
| | | | | | AB102882, | | AK040399, | Q5FBY5, | Q8C9S3 |
| | | | | | AB102883, | | AK041307, | Q5FBY6, | (SEQ ID |
| | | | | | AB102893, | | AK041403, | Q5FBY8, | NOS 103-106) |
| | | | | | AU136355, | | AK052452, | Q5FBY9 | |
| | | | | | BC032487, | | AK139858, | (SEQ ID NOS | |
| | | | | | BC047698, J04156, | | AK145184, | 96-102) | |
| | | | | | | | BC110553, | | |
| | | | | | | | BG069762, | | |
| | | | | | | | BG082754, X07962 | | |
| IGF1 | \|\|IGF1\|\|IGF 1\|\|INSULIN- | Insulin-like | 3479 | NM_000618 | AC010202, | NM_010512, | AC125082, | NP_000609, | NP_034642, |
| | LIKE GROWTH FACTOR | growth factor 1 | | (SEQ ID NO: | AY260957, | NM_184052 | AC139754, | P01343, | NP_908941, |
| | 1\|\|insulin-like growth factor | (somatomedin C) | | 107) | AY790940, M12659, | (SEQ ID NOS | M14983, M28139, | P05019, | P05017, |
| | 1 (somatomedin C)\|\| | | | | M14155, M14156, | 108-109) | AF440694, | Q13429, | Q4VjB9, |
| | | | | | S85346, X03420, | | AK038119, | Q14620, | Q4VJC0, |
| | | | | | X03421, X03422, | | AK050118, | Q59GC5, | Q547V2 |
| | | | | | X03563, AB209184, | | AK052033, | Q5U743, | (SEQ ID |
| | | | | | CR541861, M11568, | | AK081019, | Q6LD41, | NOS 120-125) |
| | | | | | M27544, M29644, | | AK155435, | Q9NP10, | |
| | | | | | M37484, U40870, | | AK165471, | Q9UC01 | |
| | | | | | X00173, X56773, | | AY878192, | (SEQ ID NOS | |
| | | | | | X56774, X57025 | | AY878193, | 110-119) | |
| | | | | | | | BC012409, | | |
| | | | | | | | BG071465, | | |
| | | | | | | | CT010364, | | |
| | | | | | | | X04480, X04482 | | |

TABLE 1B

| | | | | | | | | | |
|---|---|---|---|---|---|---|---|---|---|
| IL10 | \|\|IL10\|\|CSIF\|\|Interleukin | Interleukin 10 | 3586 | NM_000572 | AF295024, | NM_010548 | AL513351, | NP_000563, | NP_034678, |
| | 10\|\|CYTOKINE SYNTHESIS | | | (SEQ ID NO: | AF418271, | (SEQ ID NO: | M84340, | P22301, | P18893 |
| | INHIBITORY FACTOR\|\| | | | 126) | AL513315, | 127) | AK152344, | Q6FGS9, | (SEQ ID |
| | | | | | DQ217938, U16720, | | M37897 | Q6FGW4, | NOS 135-136) |
| | | | | | X78437, AF043333, | | | Q6LBF4, | |
| | | | | | AY029171, | | | Q71UZ1, | |
| | | | | | BC022315, | | | Q9BXR7 | |
| | | | | | BC104252, | | | (SEQ ID NOS | |
| | | | | | BC104253, | | | 128-134) | |
| | | | | | CR541993, | | | | |
| | | | | | CR542028, M57627 | | | | |
| IFNG | \|\|IFNG\|\|IFG\|\|IFI\|\|Interferon, | Interferon, | 3458 | NM_000619 | AC007458, | NM_008337 | AC153498, | NP_000610, | NP_032363, |
| | gamma\|\|IFN, IMMUNE\|\| | gamma | | (SEQ ID NO: | AF375790, J00219, | (SEQ ID NO: | AK089574, | P01579, | Q542B8, |
| | | | | 137) | AF506749, | 138) | AY423847, | Q14609, | P01580 |
| | | | | | AY044154, | | K00083, M28621 | Q14610, | (SEQ ID |
| | | | | | AY255837, | | | Q14611, | NOS 151-153) |
| | | | | | AY255839, | | | Q14612, | |
| | | | | | BC070256, V00543, | | | Q14613, | |
| | | | | | X01992, X13274, | | | Q14614, | |
| | | | | | X62468, X62469, | | | Q14615, | |
| | | | | | X62470, X62471, | | | Q53ZV4, | |
| | | | | | X62472, X62473, | | | Q8NHY9, | |
| | | | | | X62474, X87308 | | | Q96LA2 | |
| | | | | | | | | (SEQ ID NOS | |
| | | | | | | | | 139-150) | |
| VEGF | \|\|VEGF\|\|Vascular endothelial | Vascular | 7422 | NM_001025366, | AF095785, | NM_001025250, | AB086118, | NP_003367, | NP_001020421, |
| | growth factor\|\|VEGFA | endothelial | | NM_001025367, | AF437895, | NM_001025257, | AC127690, | NP_001020537, | NP001020428, |
| | ATHEROSCLEROSIS, | growth factor | | NM_001025368, | AL136131, M63978, | NM_009505 | AF317892, | NP_001020538, | NP033531, |
| | SUSCEPTIBILITY TO\|\| | | | NM_001025369, | S85224, AB021221, | (SEQ ID NOS | U41383, | NP_001020539, | Q00731, |
| | | | | NM_001025370, | AB209485, | 161-163) | AA959550, | NP_001020540, | Q5UD54 |
| | | | | NM_001033756, | AF022375, | | AI606078, | NP_001020541, | (SEQ ID |
| | | | | NM_003376 | AF024710, | | AK031905, | NP001028928, | NOS 177-181) |
| | | | | (SEQ ID NOS | AF062645, | | AK131850, | P15692, | |
| | | | | 154-160) | AF091352, | | AW913188, | Q59FH5, | |
| | | | | | AF214570, | | AY120866, | Q6WZM0, | |
| | | | | | AF323587, | | AY263146, | Q71S09, | |
| | | | | | AF430806, | | AY707864, | Q96FD9, | |
| | | | | | AF486837, | | AY750956, | Q9UNS8 | |
| | | | | | AJ010438, | | AY750957, | (SEQ ID NOS | |
| | | | | | AK056914, | | AY756068, | 164-176) | |
| | | | | | AK125666, | | BC022642, | | |
| | | | | | AY047581, | | BC061468, | | |
| | | | | | AY263145, | | BQ554097, | | |
| | | | | | AY500353, | | BQ832724, | | |
| | | | | | AY766116, | | CA321456, | | |
| | | | | | BC011177, | | M95200, S37052, | | |
| | | | | | BC019867, | | S38083, S38100, | | |
| | | | | | BC058855, | | U50279 | | |
| | | | | | BC065522, | | | | |
| | | | | | BQ880667, | | | | |
| | | | | | BU153227, | | | | |
| | | | | | CN256173, | | | | |
| | | | | | CR614384, | | | | |
| | | | | | CX756573, M27281, | | | | |
| | | | | | M32977, S85192, | | | | |
| | | | | | X62568 | | | | |
| CCL3 | \|\|SCYA3\|\|CCL3\|\|MIP1A\|\|LD7 | Chemokine (C—C | 6348 | NM_002983 | AC069363, D90144, | NM_011337 | AL596122, | NP_002974, | NP_035467, |
| | 8-ALPHA\|\|MACROPHAGE | motif) ligand 3 | | (SEQ ID NO: | M23178, X04018, | (SEQ ID NO: | M73061, X53372, | P10147, | P10855, |
| | INFLAMMATORY | | | 182) | AF043339, | 183) | AF065939, | Q14745 | Q5QNW0 |
| | PROTEIN 1- | | | | BC071834, D00044, | | AF065940, | (SEQ ID NOS | (SEQ ID |
| | ALPHA\|\|SMALL | | | | D63785, M23452, | | AF065941 | 184-186) | NOS 187-189) |
| | INDUCIBLE CYTOKINE | | | | M25315, X03754, | | AF065942, | | |
| | A3\|\|chemokine (C—C motif) | | | | CR591007 | | AF065943, | | |
| | ligand 3\|\|CHEMOKINE, CC | | | | | | AK150590, | | |
| | MOTIF, LIGAND 3\|\| | | | | | | AK150634, | | |
| | | | | | | | AK150698, | | |
| | | | | | | | AK151581, | | |
| | | | | | | | AK152648, | | |
| | | | | | | | AK153155, | | |
| | | | | | | | AK155058, | | |
| | | | | | | | J04491, M23447, | | |
| | | | | | | | X12531, | | |
| | | | | | | | AA895994 | | |
| CCL5 | \|\|TCP228\|\|SCYA5\|\|CCL5\|\|T | Chemokine (C—C | 6352 | NM_002985 | AB023652, | NM_013653 | AB051897, | NP_002976, | NP_038681, |
| | CELL-SPECIFIC RANTES\|\|T | motif) ligand 5 | | (SEQ ID NO: | AB023653, | (SEQ ID NO: | AL596122, | P13501, | P30882, |
| | CELL-SPECIFIC PROTEIN | | | 190) | AB023654, | 191) | U02298, X70675, | Q9UBL2 | Q5XZF2 |
| | p228\|\|SMALL INDUCIBLE | | | | AC015849, | | AF065944, | (SEQ ID NOS | (SEQ ID |
| | CYTOKINE A5\|\|chemokine | | | | AF088219, | | AF065945, | 192-194) | NOS 195-197) |
| | (C—C motif) ligand | | | | DQ017060, | | AF065946, | | |
| | 5\|\|CHEMOKINE, CC MOTIF, | | | | AF043341, | | AF065947, | | |
| | LIGAND 5\|\|REGULATED | | | | AF266753, | | AF128187, | | |
| | UPON ACTIVATION, | | | | BC008600, | | AK003101, | | |
| | NORMALLY T- | | | | BG272739, M21121, | | AK158074, | | |
| | EXPRESSED, AND | | | | BM917378 | | AY722103, | | |
| | PRESUMABLY | | | | | | BC033508, | | |
| | SECRETED\|\| | | | | | | CT010315, | | |
| | | | | | | | M77747, S37648, | | |
| | | | | | | | AI020884 | | |
| IL6 | \|\|IL6\|\|IFNB2\|\|HSF\|\|BSF2\|\| | Interleukin 6 | 3569 | NM_000600 | AC073072, | NM_031168 | AC112933, | NP_000591, | NP_112445, |
| | INTERFERON, BETA- | (interferon, | | (SEQ ID NO: | AF372214, | (SEQ ID NO: | M20572, M24221, | P05231, | P08505 |
| | 2\|\|HYBRIDOMA GROWTH | beta 2) | | 198) | CH236948, X04402, | 199) | M36996, X51457, | Q75MH2, | (SEQ ID |
| | FACTOR\|\|HEPATOCYTE | | | | Y00081, BC015511, | | AK089780, | Q8N6X1 | NOS 204-205) |
| | STIMULATORY | | | | BT019748, | | AK150440, | (SEQ ID NOS | |
| | FACTOR\|\|B-CELL | | | | BT019749, | | AK152189, | 200-203) | |
| | DIFFERENTIATION | | | | CR450296, | | J03783, X06203, | | |
| | FACTOR\|\|B-CELL | | | | CR590965, | | X54542 | | |
| | STIMULATORY FACTOR | | | | CR626263, M14584, | | | | |
| | 2\|\|Interleukin 6 (interferon, | | | | M18403, M29150, | | | | |
| | beta 2)\|\|HGF SERUM IL6 | | | | M54894, S56892, | | | | |
| | LEVEL IN INCREASED | | | | X04403, X04430, | | | | |
| | BMI, MODIFIER OF\|\| | | | | X04602, A09363 | | | | |
| IL8 | \|\|SCYB8\|\|GCP1\|\|IL8\|\|CXCL8\|\| | Interleukin 8 | 3576 | NM_000584 | AC112518, | N/A | | NP_000575, | N/A |
| | NAP1\|\|Interleukin | | | (SEQ ID NO: | AF385628, D14283, | | | P10145 | |
| | 8\|\|NEUTROPHIL- | | | 206) | M23344, | | | (SEQ ID NOS | |
| | ACTIVATING PEPTIDE | | | | M28130AJ227913, | | | 207-208) | |
| | 1\|\|MONOCYTE-DERIVED | | | | AK131067, | | | | |
| | NEUTROPHIL | | | | BC013615, | | | | |
| | CHEMOTACTIC | | | | BT007067, | | | | |
| | FACTOR\|\|GRANULOCYTE | | | | CR542151, | | | | |
| | CHEMOTACTIC PROTEIN | | | | CR594973, | | | | |
| | 1\|\|CXC CHEMOKINE | | | | CR600500, | | | | |
| | LIGAND 8\|\|SMALL | | | | CR601533, | | | | |
| | INDUCIBLE CYTOKINE | | | | CR601902, | | | | |
| | SUBFAMILY B, MEMBER | | | | CR603686, | | | | |
| | 8\|\| | | | | CR619554, | | | | |
| | | | | | CR623683, | | | | |
| | | | | | CR623827, M17017, | | | | |
| | | | | | M26383, Y00787, | | | | |
| | | | | | Z11686 | | | | |
| ICAM1 | \|\|ICAM1\|\|ANTIGEN | Intercellular | 3383 | NM_000201 | AC011511, | NM_010493 | AC159314, | NP_000192, | NM_010493, |
| | IDENTIFIED BY | adhesion | | (SEQ ID NO: | AY225514, M65001, | (SEQ ID NO: | M90546, M90547, | O00177, | P13597; |
| | MONOCLONAL | molecule 1 | | 209) | U86814, X57151, | 210) | M90548, M90549, | P05362, | Q61828 |
| | ANTIBODY | (CD54), human | | | X59286, AF340038, | | M90550, M90551, | Q14601, | (SEQ ID |
| | BB2\|\|SURFACE ANTIGEN | rhinovirus | | | AF340039, | | AK149748, | Q15463, | NOS 219-221) |
| | OF ACTIVATED B CELLS, | receptor | | | AK130659, | | AK149781, | Q5NKV7, | |
| | BB2\|\|intercellular adhesion | | | | BC015969, | | AK149945, | Q5NKV8, | |
| | molecule 1 (CD54), human | | | | BT006854, | | AK150003, | Q99930 | |
| | rhinovirus receptor\|\| | | | | CR617464, J03132, | | AK150049, | (SEQ ID NOS | |
| | | | | | M24283, M55038, | | AK150057, | 211-218) | |
| | | | | | M55091, S82847, | | AK150141, | | |
| | | | | | X06990 | | AK150327, | | |
| | | | | | | | AK151227, | | |
| | | | | | | | AK151681, | | |
| | | | | | | | AK152155, | | |
| | | | | | | | AK152527, | | |
| | | | | | | | AK152530, | | |
| | | | | | | | AK152556, | | |
| | | | | | | | AK156417, | | |
| | | | | | | | AK168275, | | |
| | | | | | | | AK171502, | | |
| | | | | | | | AK171520, | | |
| | | | | | | | AK172321, | | |
| | | | | | | | BC008626, | | |
| | | | | | | | CT010246, | | |
| | | | | | | | CT010302, | | |
| | | | | | | | M31585, X16624, | | |
| | | | | | | | X52264, X54331 | | |
| TIMP1 | \|\|TIMP1\|\|HCI\|\|EPA\|\|COLLA | TIMP | 7076 | NM_003254 | AY932824, D11139, | NM_011593 | AL671885, | NP_003245; | NP_035723, |
| | GENASE INHIBITOR, | metallopeptidase | | (SEQ ID NO: | L47361, Z84466, | (SEQ ID NO: | M21162, M28308, | Q58P21, | P12032, |
| | HUMAN\|\|TIMP | inhibitor 1 | | 222) | AK074854, | 223) | M28309, M28310, | Q5H9A7, | Q60734 |
| | metallopeptidase inhibitor | | | | BC000866, | | M28311, M28312, | Q6FGX5, | (SEQ ID |
| | 1\|\|tissue inhibitor of | | | | BC007097, | | X69413 | Q96QM2, | NOS 232-234) |
| | metalloproteinase 1 | | | | BQ181804, | | AY622853, | P01033; | |
| | (erythroid potentiating | | | | BU857950, | | BC008107, | Q14252; | |
| | activity, collagenase | | | | CR407638, | | BC034260, | Q9UCU1 | |
| | inhibitor)\|\| | | | | CR541982, | | BC051260, | (SEQ ID NOS | |
| | | | | | CR590572, | | M17243, V00755, | 224-231) | |
| | | | | | CR593351, | | X04684 | | |
| | | | | | CR602090, M12670, | | | | |
| | | | | | M59906, S68252, | | | | |
| | | | | | X02598, X03124, | | | | |
| | | | | | A10416 | | | | |
| CCL19 | \|\|CCL19\|\|ELC\|\|MIP3B\|\|SCYA19\|\| | Chemokine (C—C | 6363 | NM_006274 | AJ223410, | NM_011888 | AF307988, | NP_006265, | NP_036018, |
| | EBI1-LIGAND | motif) ligand | | (SEQ ID NO: | AL162231, | (SEQ ID NO: | AF308159, | Q6IBD6, | 070460, |
| | CHEMOKINE\|\|EXODUS | 19 | | 235) | AB000887, | 236) | AL772334, | Q99731 | Q548P0 |
| | 3\|\|MACROPHAGE | | | | BC027968, | | AF059208, | (SEQ ID NOS | (SEQ ID |
| | INFLAMMATORY | | | | CR456868, | | AK144337, | 237-239) | NOS 240-242) |
| | PROTEIN 3- | | | | CR623730, U77180, | | AK156269, | | |
| | BETA\|\|CHEMOKINE, CC | | | | U88321, BM720436 | | BC025130, | | |
| | MOTIF, LIGAND | | | | | | BC051472, | | |
| | 19\|\|chemokine (C—C motif) | | | | | | BE864988 | | |
| | ligand 19\|\|SMALL | | | | | | | | |
| | INDUCIBLE CYTOKINE | | | | | | | | |
| | SUBFAMILY A, MEMBER | | | | | | | | |
| | 19\|\| | | | | | | | | |
| CCL21 | \|\|SCYA21\|\|CCL21\|\|SLC\|\|EXODUS | Chemokine (C—C | 6366 | NM_002989 | AF030572, | NM_023052 | | NP_002980, | NP_075539 |
| | 2\|\|SECONDARY | motif) ligand | | (SEQ ID NO: | AJ005654, | (SEQ ID NO: | | O00585, | (SEQ ID |
| | LYMPHOID TISSUE | 21 | | 243) | AL162231, | 244) | | Q5VZ73, | NO: 249) |
| | CHEMOKINE\|\|CHEMOKINE, | | | | AB002409, | | | Q6ICR7 | |
| | CC MOTIF, LIGAND | | | | AF001979, | | | (SEQ ID NOS | |
| | 21\|\|chemokine (C—C motif) | | | | AY358887, | | | 245-248) | |
| | ligand 21\|\|SMALL | | | | BC027918, | | | | |
| | INDUCIBLE CYTOKINE | | | | BI833188, | | | | |
| | SUBFAMILY A, MEMBER | | | | CR450326, | | | | |
| | 21\|\| | | | | CR615435, U88320, | | | | |
| | | | | | BQ712706 | | | | |
| CSF3 | \|\|GCSF\|\|pluripoietin\|\|CSF3\|\|filgrastim\|\| | Colony | 1440 | NM_000759, | AC090844, | NM_009971 | AL590963, | NP_757374, | NP_034101, |
| | lenograstim\|\|MGC45931\|\| | stimulating | | NM_172219, | AF388025, M13008, | (SEQ ID NO: | X05402, | NP000750, | P09920 |
| | G- | factor 3 | | NM_172220 | X03656, BC033245, | 253) | AK145177, | NP75373, | (SEQ ID |
| | CSF\|\|GRANULOCYTE | (granulocyte) | | (SEQ ID NOS | CR541891, M17706, | | M13926 | P09919, | NOS 260-261) |
| | COLONY-STIMULATING | | | 250-252) | X03438, X03655 | | | Q6FH65, | |
| | FACTOR\|\|COLONY- | | | | | | | Q8N4W3 | |
| | STIMULATING FACTOR | | | | | | | (SEQ ID NOS | |
| | 3\|\|granulocyte colony | | | | | | | 254-259) | |
| | stimulating factor\|\|Colony | | | | | | | | |
| | stimulating factor 3 | | | | | | | | |
| | (granulocyte)\|\|colony | | | | | | | | |
| | stimulating factor 3 isoform | | | | | | | | |
| | c\|\|colony stimulating factor 3 | | | | | | | | |
| | isoform a precursor\|\|colony | | | | | | | | |
| | stimulating factor 3 isoform | | | | | | | | |
| | b precursor\|\| | | | | | | | | |
| TNFSF11 | \|\|ODF\|\|OPGL\|\|RANKL\|\|TRANCE\|\| | Tumor necrosis | 8600 | NM_003701, | AL139382, | NM_011613 | AB022039, | NP_143026, | NP_035743, |
| | TNFSF11\|\|OSTEOPROTEGERIN | factor (ligand) | | NM_033012 | AB037599, | (SEQ ID NO: | AC12669, | NP_003692, | O35235 |
| | LIGAND\|\|OSTEOCLAST | superfamily, | | (SEQ ID NOS | AB061227, | 264) | AB008426, | O14788, | (SEQ ID |
| | DIFFERENTIATION | member 11 | | 262-263) | AB064268, | | AB032771, | Q54A98, | NOS 270-271) |
| | FACTOR\|\|TNF-RELATED | | | | AB064269, | | AB032772, | Q5T9Y4 | |
| | ACTIVATION-INDUCED | | | | AB064270, | | AB036798, | (SEQ ID NOS | |
| | CYTOKINE\|\|RECEPTOR | | | | AF013171, | | AF013170, | 265-269) | |
| | ACTIVATOR OF NF- | | | | AF019047, | | AF019048, | | |
| | KAPPA-B LIGAND\|\|Tumor | | | | AF053712, | | AF053713, | | |
| | necrosis factor (ligand) | | | | BC074823, | | AK041129, | | |
| | superfamily, member | | | | BC074890, | | AK159498, | | |
| | 11\|\|TUMOR NECROSIS | | | | | | AK159997 | | |
| | FACTOR LIGAND | | | | | | | | |
| | SUPERFAMILY, MEMBER | | | | | | | | |
| | 11\|\| | | | | | | | | |
| IL2 | \|\|IL2\|\|TCGF\|\|Interleukin 2\|\|T- | Interleukin 2 | 3558 | NM_000586 | AC022489, | NM_008366 | AF195954, | NP_000577, | NP_032392, |
| | CELL GROWTH FACTOR\|\| | | | (SEQ ID NO: | AF031845, | (SEQ ID NO: | AF195955, | P60568, | P04351 |
| | | | | 273) | AF359939, J00264, | 274) | AF195956, | Q13169, | (SEQ ID |
| | | | | | K02056, M13879, | | AF399982, | Q16334, | NOS 286-287) |
| | | | | | M22005, M33199, | | AL645966, | Q6NZ91, | |
| | | | | | X00695, X61155, | | AL662823, | Q6NZ93, | |
| | | | | | AF228636, | | L07574, L07576, | Q6QWN0, | |
| | | | | | AF532913, | | M16760, M16761, | Q71V48, | |
| | | | | | AY283686, | | M16762, X01663, | Q7Z7M3, | |
| | | | | | AY523040, | | X01664, X01665, | Q8NFA4, | |
| | | | | | BC066254, | | X52618, | Q9C001 | |
| | | | | | BC066255, | | AF065914, | (SEQ ID NOS | |
| | | | | | BC066256, | | AF065915, | 275-285) | |
| | | | | | BC066257, | | AF065916, | | |
| | | | | | BC070338, | | AF352786, | | |
| | | | | | DQ231169, S77834, | | AF538059, | | |
| | | | | | S77835, S82692, | | AF542383, | | |
| | | | | | U25676, V00564, | | AF542384, | | |
| | | | | | X01586, A14844 | | AF542385, | | |
| | | | | | | | AY147902, | | |
| | | | | | | | K02292, U41494, | | |
| | | | | | | | U41504, U41505, | | |
| | | | | | | | U41506, X01772, | | |
| | | | | | | | X66058, X73040 | | |
| IL4 | \|\|IL4\|\|BSF1\|\|Interleukin 4\|\|B- | Interleukin 4 | 3565 | NM_000589, | AC004039, | NM_021283 | AC005742, | NP_758858, | NP_067258, |
| | CELL STIMULATORY | | | NM_172348 | AF395008, | (SEQ ID NO: | AL596095, | P05112, | P07750, |
| | FACTOR 1\|\| | | | (SEQ ID NOS | AF465829, M23442, | 290) | AL645741, | Q5FC01, | Q5SV00 |
| | | | | 288-289) | X06750, AB102862, | | U07869, X05064, | Q6NWP0, | (SEQ ID |
| | | | | | AF043336, | | X05252, X05253, | Q6NZ77, | NOS 297-299) |
| | | | | | BC066277, | | AB174765, | Q9UPB9 | |
| | | | | | BC066278, | | AF352783, | (SEQ ID NOS | |
| | | | | | BC067514, | | BC027514, | 291-296) | |
| | | | | | BC067515, | | M13238, M25892, | | |
| | | | | | BC070123, M13982, | | X03532 | | |
| | | | | | X81851 | | | | |
| IL13 | \|\|IL13\|\|Interleukin 13\|\| | Interleukin 13 | 3596 | NM_002188 | AC004039, | NM_008355 | AC005742, | NP_002179, | NP_032381, |
| | | | | (SEQ ID NO: | AF172149, | (SEQ ID NO: | AL645741, | P35225, | P20109, |
| | | | | 300) | AF172150, | 301) | L13028, M23504 | Q4VB50, | Q5SUZ9 |
| | | | | | AF193838, | | | Q4VB51, | (SEQ ID |
| | | | | | AF193839, | | | Q4VB52, | NOS 308-310) |
| | | | | | AF193840, | | | Q4VB53 | |
| | | | | | AF377331, | | | (SEQ ID NOS | |
| | | | | | AF416600, | | | 302-307) | |
| | | | | | AY008331, | | | | |
| | | | | | AY008332, L13029, | | | | |
| | | | | | L42079, L42080, | | | | |
| | | | | | U10307, U31120, | | | | |
| | | | | | AF043334, | | | | |
| | | | | | BC096138, | | | | |
| | | | | | BC096139, | | | | |
| | | | | | BC096140, | | | | |
| | | | | | BC096141, L06801, | | | | |
| | | | | | X69079 | | | | |
| IL1b | \|\|IL1B\|\|IL1- | Interleukin 1, | 3553 | NM_000576 | AC079753, | NM_008361 | AL808143, | NP_000567, | NP_032387, |
| | BETA\|\|INTERLEUKIN 1- | beta | | (SEQ ID NO: | AY137079, | (SEQ ID NO: | AY902319, | O43645, | P10749 |
| | BETA\|\|Interleukin 1, beta\|\| | | | 311) | BN000002, M15840, | 312) | U03987, X04964, | P01584, | (SEQ ID |
| | | | | | X04500, X52430, | | AK156396, | Q53X59, | NOS 318-319) |
| | | | | | X52431, AF043335, | | AK157245, | Q53XX2 | |
| | | | | | BC008678, | | AK168047, | (SEQ ID NOS | |
| | | | | | BT007213, | | BC011437, | 313-317) | |
| | | | | | CR407679, K02770, | | M15131 | | |
| | | | | | M15330, M54933, | | | | |
| | | | | | X02532, X56087 | | | | |
| CCL12 | | mouse protein | | | | NM_011331 | AL645596, | | NP_035461, |
| | | only | | | | (SEQ ID NO: | AF065934, | | Q5SVB4, |
| | | | | | | 320) | AF065935, | | Q62401, |
| | | | | | | | AF065936, | | Q9QYD6 |
| | | | | | | | AF065937, | | (SEQ ID |
| | | | | | | | AF065938, | | NOS 321-324) |
| | | | | | | | AK012356, | | |
| | | | | | | | BC027520, | | |
| | | | | | | | U50712, U66670 | | |
| CCL9 | | mouse protein | | | | NM_011338 | AB051897, | | NP_035468; |
| | | only | | | | (SEQ ID NO: | AL596122, | | P51670; |
| | | | | | | 325) | AY902335, | | Q5QNW2 |
| | | | | | | | AF128195, | | (SEQ ID |
| | | | | | | | AF128196, | | NOS 326-328) |
| | | | | | | | AF128197, | | |
| | | | | | | | AF128198, | | |
| | | | | | | | AF128199, | | |
| | | | | | | | AF128200, | | |
| | | | | | | | AF128201, | | |
| | | | | | | | AF128202, | | |
| | | | | | | | AF128203, | | |
| | | | | | | | AF128204, | | |
| | | | | | | | AI323857, | | |
| | | | | | | | AK151131, | | |
| | | | | | | | AK151340, | | |
| | | | | | | | AK151649, | | |
| | | | | | | | AK151953, | | |
| | | | | | | | AK154511, | | |
| | | | | | | | AK154657, | | |
| | | | | | | | AK155032, | | |
| | | | | | | | AK155036, | | |
| | | | | | | | U15209, U19482, | | |
| | | | | | | | U49513 | | |
| CXCL1 | \|\|CXCL1\|\|NAP-3\|\|MGSA- | Chemokine | 2919 | NM_001511 | AC092438, U03018, | NM_008176 | AC157938 | NP_001502, | NP_032202, |
| | a\|\|SCYB1\|\|GROa\|\|MGSA | (C—X—C motif) | | (SEQ ID NO: | X54489, BC011976, | (SEQ ID NO: | (110717..112522), | P09341, | P12850, |
| | alpha\|\|GRO PROTEIN, | ligand 1 | | 329) | BT006880, J03561, | 330) | S79767, U20527, | Q6LD34 | Q5U5W9 |
| | ALPHA\|\|MELANOMA | (melanoma | | | X12510, BF032655 | | U20634, | (SEQ ID NOS | (SEQ ID |
| | GROWTH STIMULATORY | growth | | | | | AK140312, | 331-333) | NOS 334-336) |
| | ACTIVITY, | stimulating | | | | | BC037997, | | |
| | ALPHA\|\|melanoma growth | activity, alpha) | | | | | BG067198, | | |
| | stimulatory activity | | | | | | BG080268, | | |
| | alpha\|\|KC CHEMOKINE, | | | | | | J04596, | | |
| | MOUSE, HOMOLOG | | | | | | BQ031102 | | |
| | OF\|\|CHEMOKINE, CXC | | | | | | | | |
| | MOTIF, LIGAND 1\|\|GRO1 | | | | | | | | |
| | oncogene (melanoma | | | | | | | | |
| | growth-stimulating | | | | | | | | |
| | activity)\|\|GRO1 oncogene | | | | | | | | |
| | (melanoma growth | | | | | | | | |
| | stimulating activity, | | | | | | | | |
| | alpha)\|\|SMALL | | | | | | | | |
| | INDUCIBLE CYTOKINE | | | | | | | | |
| | SUBFAMILY B, MEMBER | | | | | | | | |
| | 1\|\|chemokine (C—X—C motif) | | | | | | | | |
| | ligand 1 (melanoma growth | | | | | | | | |
| | stimulating activity, alpha)\|\| | | | | | | | | |
| CXCL2 | \|\|MIP2A\|\|GROb\|\|MGSA- | Chemokine | 2920 | NM_002089 | AC093677 | NM_009140 | AC157938, | NP_002080, | NP_033166, |
| | b\|\|MIP2- | (C—X—C motif) | | (SEQ ID NO: | (22698..24854, | (SEQ ID NO: | S61346, | P19875, | P10889 |
| | ALPHA\|\|SCYB2\|\|CXCL2\|\|MIP- | ligand 2 | | 337) | complement), | 338) | AK137628, | Q6FGD6, | (SEQ ID |
| | 2a\|\|CINC-2a\|\|GRO2 | | | | U03019, AF043340, | | AK150450, | Q6LD33 | NOS 343-344) |
| | oncogene\|\|MGSA beta\|\|GRO | | | | BC005276, | | AK155458, | (SEQ ID NOS | |
| | PROTEIN, | | | | BC015753, | | AK155874, | 339-342) | |
| | BETA\|\|MACROPHAGE | | | | BC053653, | | AK155916, | | |
| | INFLAMMATORY | | | | CR542171, | | AK157079, | | |
| | PROTEIN 2\|\|melanoma | | | | CR617096, M36820, | | X53798 | | |
| | growth stimulatory activity | | | | M57731, X53799 | | | | |
| | beta\|\|CHEMOKINE, CXC | | | | | | | | |
| | MOTIF, LIGAND | | | | | | | | |
| | 2\|\|chemokine (C—X—C motif) | | | | | | | | |
| | ligand 2\|\|SMALL | | | | | | | | |
| | INDUCIBLE CYTOKINE | | | | | | | | |
| | SUBFAMILY B, MEMBER | | | | | | | | |
| | 2\|\| | | | | | | | | |
| IL12B | \|\|NKSF2\|\|CLMF2\|\|IL12B\|\|IL12, | Interleukin 12B | 3593 | NM_002187 | AC011418, | NM_008352 | AL607030, | NP_002178, | NP_032378, |
| | SUBUNIT p40\|\|IL23, | (natural killer | | (SEQ ID NO: | AF512686, | (SEQ ID NO: | AL669944, | P29460, | P43432 |
| | SUBUNIT p40\|\|NATURAL | cell stimulatory | | 345) | AY008847, | 346) | D63333, S82421, | Q8NOX8 | (SEQ ID |
| | KILLER CELL | factor 2, | | | AY064126, U89323, | | S82422, S82424, | (SEQ ID NOS | NOS 350-351) |
| | STIMULATORY FACTOR, | cytotoxic | | | AF180563, | | S82425, S82426, | 347-349) | |
| | 40-KD | lymphocyte | | | AY046592, | | AF128214, | | |
| | SUBUNIT\|\|interleukin 12B | maturation | | | AY046593, | | AF128215, | | |
| | (natural killer cell | factor 2, p40) | | | BC067498, | | AK155593, | | |
| | stimulatory factor 2, | | | | BC067499, | | AK162981, | | |
| | cytotoxic lymphocyte | | | | BC067500, | | BC103608, | | |
| | maturation factor 2, p40)\|\| | | | | BC067501, | | BC103609, | | |
| | | | | | BC067502, | | BC103610, | | |
| | | | | | BC074723, M65272, | | BC103614, | | |
| | | | | | M65290 | | M86671 | | |
| LEP | \|\|LEP\|\|Leptin (obesity homolog, | Leptin (obesity | 3952 | NM_000230 | AC018635, AC018662, | NM_008493 | AC072048, U22421, | NP_000221, | NP_032519, |
| | mouse)\|\|LEP OBESE, MOUSE, | homolog, mouse) | | (SEQ ID | AY996373, CH236947, | (SEQ ID NO: 353) | U52147, AK030984, | P41159, Q4TVR7, | P41160, |
| | HOMOLOG OF\|\| | | | NO: 352) | D63519, D63710, | | AK142589, | Q6NT58 | Q544U0 |
| | | | | | DQ054472, U43415, | | BC038162, U18812 | (SEQ ID NOS | (SEQ ID |
| | | | | | AF008123, BC060830, | | | 354-357) | NOS 358-360) |
| | | | | | BC069323, BC069452, | | | | |
| | | | | | BC069527, D49487, | | | | |
| | | | | | U18915, U43653 | | | | |

[0082] In addition to the specific biomarker sequences identified in this application by name, accession number, or sequence, the invention also contemplates contemplates use of biomarker variants that are at least 90% or at least 95% or at least 97% identical to the exemplified sequences and that are now known or later discover and that have utility for the methods of the invention. These variants may represent polymorphisms, splice variants, mutations, and the like. Various techniques and reagents find use in the diagnostic methods of the present invention. In one embodiment of the invention, blood samples, or samples derived from blood, e.g. plasma, circulating, etc. are assayed for the presence of polypeptides. Typically a blood sample is drawn, and a derivative product, such as plasma or serum, is tested. Such polypeptides may be detected through specific binding members. The use of antibodies for this purpose is of particular interest. Various formats find use for such assays, including antibody arrays; ELISA and RIA formats; binding of labeled antibodies in suspension/solution and detection by flow cytometry, mass spectroscopy, and the like. Detection may utilize one or a panel of antibodies, preferably a panel of antibodies in an array format. Expression signatures typically utilize a detection method coupled with analysis of the results to determine if there is a statistically significant match with a disease signature.

[0083] In another embodiment, in vivo imaging is utilized to detect the presence of atherosclerosis associated proteins in heart tissue. Such methods may utilize, for example, labeled antibodies or ligands specific for such proteins. In these embodiments, a detectably-labeled moiety, e.g., an antibody, ligand, etc., which is specific for the polypeptide is administered to an individual (e.g., by injection), and labeled cells are located using standard imaging techniques, including, but not limited to, magnetic resonance imaging, computed tomography scanning, and the like. Detection may utilize one or a cocktail of imaging reagents.

[0084] In another embodiment, an mRNA sample from vessel tissue, preferably from one or more vessels affected by atherosclerosis, is analyzed for the genetic signature indicating atherosclerosis.

[0085] The provided patterns of circulating protein expression characterize the inflammatory signature in atherosclerosis, and further links specific immune related pathways to diabetes and medication therapy. While current data suggests a significant role for inflammation in atherosclerosis, there remains little direct data linking immune pathways in the vessel wall to critical aspects of the disease, including the mechanisms by which risk factors impact the primary inflammatory process, and how medications that modify risk factors such as hypertension and hyperlipidemia may specifically impact inflammation. The present invention identifies expression profiles of biomarkers of inflammation that can be used for diagnosis and classification of atherosclerotic cardiovascular disease.

[0086] In methods of diagnosing a patient for atherosclerosis and related conditions, the expression pattern in blood, serum, etc. of the markers provided herein is obtained, and compared to control values to determine a diagnosis. The analysis of the invention may further include input from clinical variables. For example, a blood derived patient sample, e.g. blood, plasma, serum, etc. may be applied to a specific binding agent or panel of specific binding agents, to determine the presence of the markers of interest. The analysis will generally include at least one of the markers described herein, e.g., M-CSF, eotaxin, IP-10, MCP-1, MCP-2, MCP-3, MCP-4, IL-3, IL-5, IL-7, IL-8, MIP1a, TNFa, Ang-2, IGF-1 and RANTES, usually at least two of the markers, more usually at least three of the markers, and may include 4, 5, 6, 7 or up to all of the markers. A preferred set of markers comprises at least three of the following: MCP-1, MCP-2, MCP-3, MCP-4, eotaxin, IP-10, M-CSF, IL-3, TNFa, Ang-2, IL-5, IL-7 and TGF-1, and may include, 4, 5, 6, 7, 8, 9, 10, 11, 12, or all of them.

[0087] The analysis may further comprise the inclusion of expression information from additional proteins, which may be present in serum or in tissue samples. Quantitative information will be obtained by methods suitable for the marker. Markers include, without limitation, sVCAM; sICAM-1; E-selectin; P-selection; interleukin-6, interleukin-18; creatine kinase; LDL, oxLDL, LDL particle size, Lipoprotein(a); troponin I, troponin T; LPLA2; CRP; Ccl9; Ccl2; Ccl21; Ccl19; IL-5; Tnfsf11; Vegfa; Cxcl1; leptin, HDL, Triglyceride, insulin, BNP (brain naturetic peptide), fractalkine, osteopontin, osteoprotegerin, oncostatin-M, Myeloperoxidase, ADMA, PAI-1 (plasminogen activator inhibitor), SAA (serum amyloid A), t-PA (tissue-type plasminogen activator), sCD40 ligand, fibrinogen, homocysteine, D-dimer, leukocyte count, etc. Additional variables include clinical indicia, which will typically be assessed and the resulting data combined in an algorithm with the circulating marker analysis. Such clinical markers include, without limitation: gender; age; glucose; insulin; body mass index (BMI); heart rate; waist size; systolic blood pressure; diastolic blood pressure; dyslipidemia; cigarette smoking; and the like. Other variables include metabolic measures, genetic information, and gene expression measures from peripheral blood.

[0088] The methods of the invention may be used for atherosclerosis staging, atherosclerosis prognosis, assessing extent of atherosclerosis progression, monitoring a therapeutic response, etc. One of ordinary skill having the benefit of this disclosure will readily understand how to practice the invention for these uses. For example, atherosclerosis staging may be accomplished by comparison of an individual dataset against with one or more datasets obtained from disease samples of known stage or by constructing a model that predicts stage and inputting a dataset in that model to obtain a predicted staging. Similar methods may be used to provide atherosclerosis prognosis. Progression may be monitored, by looking at changes over time in one or more predictors obtained from a predictive model such as, e.g., a model described infra. Therapeutic responses may be determined by using the methods of the invention and determining whether one or more classifications obtained from a subject with known disease trend toward or lie within a normal classification.

[0089] The quantitation of markers in a test sample is determined by the methods described above and as known in the art. The quantitative data thus obtained is then subjected to an analytic classification process. In such a process, the raw data is manipulated according to an algorithm, where the algorithm has been pre-defined by a training set of data, for example as described in the examples provided herein. An algorithm may utilize the training set of data provided herein, or may utilize the guidelines provided herein to generate an algorithm with a different set of data.

[0090] An analytic classification process may use any one of a variety of statistical analytic methods to manipulate the quantitative data and provide for classification of the sample. Examples of useful methods include linear discriminant analysis, recursive feature elimination, a prediction analysis of microarray, a logistic regression, a CART algorithm, a FlexTree algorithm, a LART algorithm, a random forest algorithm, a MART algorithm, machine learning algorithms; etc.

[0091] Using any one of these methods, an atherosclerosis dataset is used to generate a predictive model. In the generation of such a model, a dataset comprising control and diseased samples is used as a training set. A training set will contain data for each of the markers of interest. Examples of predictive models for markers of interest are provided herein, for example see Examples 6-10.

[0092] The predictive models demonstrated herein utilize the results of multiple protein level determinations, and provide an algorithm that will classify with a desired degree of accuracy an individual as belonging to a particular state, where a state may be atherosclerotic or non-atherosclerotic. Classification of interest include, without limitation, the assignment of a sample to one or more of the atherosclerotic disease states i) atherosclerotic state vs. non-atherosclerotic state, ii) MI state vs. angina state, iii) low calcium state versus high calcium state.

[0093] Classification can be made according to predictive modeling methods that set a threshold for determining the probability that a sample belongs to a given class. The probability preferably is at least 50%, or at least 60% or at least 70% or at least 80% or higher. Classifications also may be made by determining whether a comparison between an obtained dataset and a reference dataset yields a statistically significant difference. If so, then the sample from which the dataset was obtained is classified as not belonging to the reference dataset class. Conversely, if such a comparison is not statistically significantly different from the reference dataset, then the sample from which the dataset was obtained is classified as belonging to the reference dataset class.

[0094] The predictive ability of a model may be evaluated according to its ability to provide a quality metric, e.g. AUC or accuracy, of a particular value, or range of values. In some embodiments, a desired quality threshold is a predictive model that will classify a sample with an accuracy of at least about 0.7, at least about 0.75, at least about 0.8, at least about 0.85, at least about 0.9, at least about 0.95, or higher. As an alternative measure, a desired quality threshold may refer to a predictive model that will classify a sample with an AUC (area under the curve) of at least about 0.7, at least about 0.75, at least about 0.8, at least about 0.85, at least about 0.9, or higher.

[0095] As is known in the art, the relative sensitivity and specificity of a predictive model can be “tuned” to favor either the selectivity metric or the sensitivity metric, where the two metrics have an inverse relationship. The limits in a model as described above can be adjusted to provide a selected sensitivity or specificity level, depending on the particular requirements of the test being performed. One or both of sensitivity and specificity may be at least about at least about 0.7, at least about 0.75, at least about 0.8, at least about 0.85, at least about 0.9, or higher.

[0096] The raw data may be initially analyzed by measuring the values for each marker, usually in triplicate or in multiple triplicates. The data may be manipulated, for example, raw data may be transformed using standard curves, and the average of triplicate measurements used to calculate the average and standard deviation for each patient. These values may be transformed before being used in the models, e.g. log-transformed, Box-Cox transformed (see Box and Cox (1964) J. Royal Stat. Soc., Series B, 26:211-246), etc. The data are then input into a predictive model, which will classify the sample according to the state. The resulting information may be transmitted to a patient or health professional.

[0097] To generate a predictive model for atherosclerotic states, a robust data set, comprising known control samples and samples corresponding to the atherosclerotic classification of interest is used in a training set. A sample size is selected using generally accepted criteria. As discussed above, different statistical methods can be used to obtain a highly accurate predictive model. Examples of such analysis are provided in Examples 5, 11 and 12.

[0098] In one embodiment, hierarchical clustering is performed in the derivation of a predictive model, where the Pearson correlation is employed as the clustering metric. One approach is to consider a patient atherosclerosis dataset as a “learning sample” in a problem of “supervised learning”. CART is a standard in applications to medicine (Singer (1999) Recursive Partitioning in the Health Sciences, Springer), which may be modified by transforming any qualitative features to quantitative features; sorting them by attained significance levels, evaluated by sample reuse methods for Hotelling's T² statistic; and suitable application of the lasso method. Problems in prediction are turned into problems in regression without losing sight of prediction, indeed by making suitable use of the Gini criterion for classification in evaluating the quality of regressions.

[0099] This approach has led to what is termed FlexTree (Huang (2004) PNAS 101:10529-10534). FlexTree has performed very well in simulations and when applied to SNP and other forms of data. Software automating FlexTree has been developed. Alternatively LARTree or LART may be used. Fortunately, recent efforts have led to the development of such an approach, termed LARTree (or simply LART) Turnbull (2005) Classification Trees with Subset Analysis Selection by the Lasso, Stanford University. The name reflects binary trees, as in CART and FlexTree; the lasso, as has been noted; and the implementation of the lasso through what is termed LARS by Efron et al. (2004) Annals of Statistics 32:407-451. See, also, Huang et al. (2004) Tree-structured supervised learning and the genetics of hypertension. Proc Natl Acad Sci USA. 101(29):10529-34.

[0100] Other methods of analysis that may be used include logic regression. One method of logic regression Ruczinski (2003) Journal of Computational and Graphical Statistics 12:475-512. Logic regression resembles CART in that its classifier can be displayed as a binary tree. It is different in that each node has Boolean statements about features that are more general than the simple “and” statements produced by CART.

[0101] Another approach is that of nearest shrunken centroids (Tibshirani (2002) PNAS 99:6567-72). The technology is k-means-like, but has the advantage that by shrinking cluster centers, one automatically selects features (as in the lasso) so as to focus attention on small numbers of those that are informative. The approach is available as PAM software and is widely used. Two further sets of algorithms are random forests (Breiman (2001) Machine Learning 45:5-32 and MART (Hastie (2001) The Elements of Statistical Learning, Springer). These two methods are already “committee methods.” Thus, they involve predictors that “vote” on outcome.

[0102] To provide significance ordering, the false discovery rate (FDR) may be determined. First, a set of null distributions of dissimilarity values is generated. In one embodiment, the values of observed profiles are permuted to create a sequence of distributions of correlation coefficients obtained out of chance, thereby creating an appropriate set of null distributions of correlation coefficients (see Tusher et al. (2001) PNAS 98, 5116-21, herein incorporated by reference). The set of null distribution is obtained by: permuting the values of each profile for all available profiles; calculating the pair-wise correlation coefficients for all profile; calculating the probability density function of the correlation coefficients for this permutation; and repeating the procedure for N times, where N is a large number, usually 300. Using the N distributions, one calculates an appropriate measure (mean, median, etc.) of the count of correlation coefficient values that their values exceed the value (of similarity) that is obtained from the distribution of experimentally observed similarity values at given significance level.

[0103] The FDR is the ratio of the number of the expected falsely significant correlations (estimated from the correlations greater than this selected Pearson correlation in the set of randomized data) to the number of correlations greater than this selected Pearson correlation in the empirical data (significant correlations). This cut-off correlation value may be applied to the correlations between experimental profiles.

[0104] Using the aforementioned distribution, a level of confidence is chosen for significance. This is used to determine the lowest value of the correlation coefficient that exceeds the result that would have obtained by chance. Using this method, one obtains thresholds for positive correlation, negative correlation or both. Using this threshold(s), the user can filter the observed values of the pairwise correlation coefficients and eliminate those that do not exceed the threshold(s). Furthermore, an estimate of the false positive rate can be obtained for a given threshold. For each of the individual “random correlation” distributions, one can find how many observations fall outside the threshold range. This procedure provides a sequence of counts. The mean and the standard deviation of the sequence provide the average number of potential false positives and its standard deviation.

[0105] In an alternative analytical approach, variables chosen in the cross-sectional analysis are separately employed as predictors. Given the specific ASCVD outcome, the random lengths of time each patient will be observed, and selection of proteomic and other features, a parametric approach to analyzing survival may be better than the widely applied semi-parametric Cox model. A Weibull parametric fit of survival permits the hazard rate to be monotonically increasing, decreasing, or constant, and also has a proportional hazards representation (as does the Cox model) and an accelerated failure-time representation. All the standard tools available in obtaining approximate maximum likelihood estimators of regression coefficients and functions of them are available with this model.

[0106] In addition the Cox models may be used, especially since reductions of numbers of covariates to manageable size with the lasso will significantly simplify the analysis, allowing the possibility of an entirely nonparametric approach to survival. These statistical tools are applicable to all manner of proteomic data. A set of biomarker, clinical and genetic data that can be easily determined, and that is highly informative regarding detection of individuals with clinically significant atherosclerotic coronary vascular disease is provided. Also, algorithms provide information regarding risk of future cardiovascular events.

[0107] In the development of a predictive model, it may be desirable to select a subset of markers, i.e. at least 3, at least 4, at least 5, at least 6, up to the complete set of markers. Usually a subset of markers will be chosen that provides for the needs of the quantitative sample analysis, e.g. availability of reagents, convenience of quantitation, etc., while maintaining a highly accurate predictive model.

[0108] The selection of a number of informative markers for building classification models requires the definition of a performance metric and a user-defined threshold for producing a model with useful predictive ability based on this metric. For example, the performance metric may be the AUC, the sensitivity and/or specificity of the prediction as well as the overall accuracy of the prediction model.

[0109] As described in Examples 5, 11 and 12, various methods are used in a training model. The selection of a subset of markers may be for a forward selection or a backward selection of a marker subset. The number of markers may be selected that will optimize the performance of a model without the use of all the markers. One way to define the optimum number of terms is to choose the number of terms that produce a model with desired predictive ability (e.g. an AUC>0.75, or equivalent measures of sensitivity/specificity) that lies no more than one standard error from the maximum value obtained for this metric using any combination and number of terms used for the given algorithm.

### Reagents and Kits

[0110] Also provided are reagents and kits thereof for practicing one or more of the above-described methods. The subject reagents and kits thereof may vary greatly. Reagents of interest include reagents specifically designed for use in production of the above described expression profiles of circulating protein markers associated with atherosclerotic conditions.

[0111] One type of such reagent is an array or kit of antibodies that bind to a marker set of interest. A variety of different array formats are known in the art, with a wide variety of different probe structures, substrate compositions and attachment technologies. Representative array or kit compositions of interest include or consist of reagents for quantitation of at least two, at least three, at least four, at least five or more markers are selected from M-CSF, eotaxin, IP-10, MCP-1, MCP-2, MCP-3, MCP-4, IL-3, IL-5, IL-7, IL-8, MIP1a, TNFa, and RANTES.

[0112] In other embodiments, a representative array or kit includes or consists of reagents for quantitation of at least three protein markers selected from the group consisting of MCP-1, MCP-2, MCP-3, MCP-4, eotaxin, IP-10, M-CSF, IL-3, TNFa, Ang-2, IL-5, IL-7, and IGF-1. The at least three protein markers may comprise or consist of a marker set selected from the group consisting of MCP-1, IGF-1, TNFa; MCP-1, IGF-1, M-CSF; ANG-2, IGF-1, M-CSF; and MCP-4, IGF-1, M-CSF.

[0113] In other embodiments, a representative array or kit includes or consists of reagents for quantitation of at least four protein markers selected from the group consisting of MCP-1, MCP-2, MCP-3, MCP-4, eotaxin, IP-10, M-CSF, IL-3, TNFa, Ang-2, IL-5, IL-7, and IGF-1. The at least four protein markers comprise or consist of MCP-1, MCP-2, MCP-3, MCP-4, eotaxin, IP-10, M-CSF, IL-3, TNFa, Ang-2, IL-5, IL-7, and IGF-1; MCP-1, IGF-1, TNFa, IL-5; MCP-1, IGF-1, M-CSF, MCP-2; ANG-2, IGF-1, M-CSF, IL-5; MCP-1, IGF-1, TNFa, MCP-2; and MCP-4, IGF-1, M-CSF, IL-5.

[0114] In other embodiments, a representative array or kit includes or consists of reagents for quantitation of at least five protein markers selected from the group consisting of MCP-1, MCP-2, MCP-3, MCP-4, eotaxin, IP-10, M-CSF, IL-3, TNFa, Ang-2, IL-5, IL-7, and IGF-1. The at least five markers may comprise or consist of a marker set selected from the group consisting of MCP-1, MCP-2, MCP-3, MCP-4, eotaxin, IP-10, M-CSF, IL-3, TNFa, Ang-2, IL-5, IL-7, and IGF-1; MCP-1, IGF-1, TNFa, IL-5, M-CSF; MCP-1, IGF-1, M-CSF, MCP-2, IP-10; ANG-2, IGF-1, M-CSF, IL-5, TNFa; MCP-1, IGF-1, TNFa, MCP-2, IP-10; MCP-4, IGF-1, M-CSF, IL-5, TNFa; and MCP-4, IGF-1, M-CSF, IL-5, MCP-2.

[0115] The kits may further include a software package for statistical analysis of one or more phenotypes, and may include a reference database for calculating the probability of classification. The kit may include reagents employed in the various methods, such as devices for withdrawing and handling blood samples, second stage antibodies, ELISA reagents; tubes, spin columns, and the like.

[0116] In addition to the above components, the subject kits will further include instructions for practicing the subject methods. These instructions may be present in the subject kits in a variety of forms, one or more of which may be present in the kit. One form in which these instructions may be present is as printed information on a suitable medium or substrate, e.g., a piece or pieces of paper on which the information is printed, in the packaging of the kit, in a package insert, etc. Yet another means would be a computer readable medium, e.g., diskette, CD, etc., on which the information has been recorded. Yet another means that may be present is a website address which may be used via the internet to access the information at a removed site. Any convenient means may be present in the kits.

### EXAMPLES

[0117] Below are examples of specific embodiments for carrying out the present invention. The examples are offered for illustrative purposes only, and are not intended to limit the scope of the present invention in any way. Efforts have been made to ensure accuracy with respect to numbers used (e.g., amounts, temperatures, etc.), but some experimental error and deviation should, of course, be allowed for.

### Example 1

### Serum Markers in an Animal Model for Atherosclerosis

[0118] Serum Biomarker Data from Mouse Protein Arrays

[0119] Given the involvement of multiple biological pathways identified through transcriptional profiling of human and mouse vascular tissue, a proof of concept study in mice was designed to examine whether a multi-analyte approach can lead to improved distinction among various stages of the atherosclerotic disease process³². The study demonstrated that quantification of multiple disease related biomarkers can provide a more sensitive and specific methodology for assessing atherosclerotic disease in mice and possibly in humans. The top serum protein classifiers identified in the study represented diverse atherosclerosis related biological processes including macrophages chemoattraction (Ccl9, Ccl2), T-cell chemokine activity (Ccl21 and Ccl19), innate immunity (IL-5), vascular calcification (Tnfsf11), angiogenesis (Vegfa), and high fat induced inflammation (Cxcl1, leptin). The signature pattern derived from simultaneous measurement of these markers added to the specificity needed for correct staging of atherosclerotic disease in mice. Further validation of this approach was obtained in prospective cohort studies in humans as described in Examples 3 and 4, below.

[0120] To identify patterns of serum protein expression that can be correlated to both disease progression and gene expression in the vascular wall, we have taken advantage of a longitudinal experimental design and mouse genetic model and diet combinations that produce varying degrees of atherosclerosis. Here, we have utilized a protein microarray to identify a set of inflammatory biomarkers that are differentially expressed in the sera of mice at levels that correlate with various severity levels of disease. The vascular wall gene expression for a subset of these markers was also evaluated by quantitative real-time reverse transcriptase polymerase chain reaction (RTPCR). Using classification algorithms to identify a set of the most sensitive discriminators, we were able to show that unique signature patterns of vascular-derived inflammatory biomarkers can accurately predict different severities of atherosclerotic disease in mice.

[0121] Methods

[0122] Experimental design, serum collection, and RNA preparation. All experiments were approved by the Stanford Committee on Animal Research. The general experimental design has been described previously (45). Three-week-old female apoE knockout (C57BL/6J-Apoetm1Unc), C57B1/6J, and C3H/HeJ mice were purchased from Jackson Laboratory (Bar Harbor, Me.). At 4 wk of age, the mice were either continued on normal chow or were fed a high-fat diet that included 21% anhydrous milkfat and 0.15% cholesterol (Dyets no. 101511; Dyets, Bethlehem, Pa.) for a maximum period of 40 wk. Serum was collected by retroorbital approach for five to nine individual mice at every time point for apoE-deficient mice on the high-fat diet from the same cohort of mice as described previously. To control for diet and genetic differences, serum was also collected at baseline and at 40 wk from apoE knockout mice (C57BL/6J-Apoetm1Unc) on normal chow and from wild-type C57B1/6J and C3H/HeJ mice on normal chow and high-fat diets. Aortas from 15 mice (3 pools of 5) were harvested for RNA isolation, as described previously (45), at each of the time points for each of the conditions (strain-diet combination) to parallel serum collection schedule. Total RNA was isolated as described previously using a modified two-step purification protocol (45, 47). Quantification of aortic atherosclerotic plaque (determined as percent lesion area in entire aorta) previously has been performed on this cohort of mice and described in a prior publication (45). Serum and aortas from a separate independent cohort of 16-wk old apoE-deficient mice on high-fat diet for 2 wk (4 pools of 3-4 animals) were also used for classification purposes. The rationale for pooling RNA and serum samples for microarray hybridizations has been discussed previously (45-47, 49). All sample processing and protein hybridization were performed at the same time to negate any potential technical variability.

[0123] Protein biochip hybridization and data processing. Serum samples were hybridized to Zyomyx Murine Cytokine BioChips (Zyomyx, Hayward, Calif.) following the manufacturer's instructions, using the Zyomyx 1200 Assay station (Zyomyx). Nine-point calibration curves were generated for each analyte for accurate determination of protein levels in test sera (please see Supplement S4 for individual calibration curves; available at the Physiological Genomics web site). 1 Protein biochips were scanned using a Zyomyx 100 fluorescence scanner, and microarray gridding was performed using GenPix Pro and Zyomyx ZDR version 4001 software. Intrachip (ratio of standard deviation of all negative control features over the average intensity for those features) and interchip variability (ratio of average standard deviation over average of median intensities) were determined as measures of quality control. Protein arrays present control variability ranging from 3 to ˜15% and sensitivity from 1 to 1,000 pg/ml depending on the analyte (see Supplemental Calibration Curves for each analyte available at http://physiolgenomics.physiology.org/cgi/content/full/00240.2005/DC1) (11). Values that were not in the linear portion of the calibration curves were marked as missing values. Numerical raw data were then migrated into an Oracle relational database (CoBi) that has been designed specifically for microarray data analysis (GeneData). Heat maps were generated using HeatMap Builder software (7). Detailed Supplemental Methods are available at http://physiolgenomics.physiology.org/cgi/content/full/00240.2005/DC1.

[0124] Protein selection algorithms and disease classification. Protein selection and classification algorithms have been described previously (45). Briefly, for supervised analyses, we used Expressionist software version 5.0 (GeneData), which employs a number of classification algorithms to rank genes based on their utility for class discrimination between time points of 0, 10, 24, and 40 wk in apoE mice on high-fat diet. These algorithms included analysis of variance (ANOVA), support vector machine (SVM) (4), and recursive feature elimination (RFE) (16), which is a recursive version of the SVM weight where genes are ranked repeatedly and a fixed fraction of worst scorers are removed each time (35). We also used the previously described prediction analysis of microarray (PAM) as an additional classification algorithm (48). Each method was then used to determine the optimal number of ranked genes to classify the experiments into their correct groups at minimal error rate. The optimal error rate or misclassification was calculated by cross-validation with 25% of the experiments as the test group and the rest as the training group. This was reiterated 1,000 times for ANOVA, SVM, and RFE algorithms. In our analyses, we used a linear kernel for SVM and RFE; a nonlinear Gaussian kernel yielded similar results. This minimal subset of classifier genes was then used for cross-validation as well as classification of another independent data set. Detailed methods are provided in http://physiolgenomics.physiology.org/cgi/content/full/00240.2005/DC1.

[0125] Cross-validation and analysis of independent data sets. To determine the accuracy of classification based on the small subset of proteins identified earlier, we utilized the SVM algorithm (linear kernel) to generate a confusion matrix using cross-validation with repeated splits into 75% training and 25% test sets. Results are represented in tabular fashion. We also utilized the SVM algorithm for classification of independent groups of experiments as described previously (45, 50). In this analysis, we used the four time points in apoE-deficient mice as the training set and the independent set of experiments as the test set. SVM output for each experiment based on one-vs.-all comparisons was represented graphically in a heat map format (see FIG. 3), which is the normalized margin value for each of the four SVM classifiers mentioned above. The SVM output allows us to view how a new experiment is classified according to the four SVM hyperplanes. Detailed methods are available at http://physiolgenomics.physiology.org/cgi/content/full/00240.2005/DC1.

[0126] Quantitative real-time RT-PCR. Primers and probes for 10 genes of interest were obtained from Applied Biosystems Assays-on-Demand for Taqman analysis (Table 2).

TABLE 2

| Zymomyx Mu_chip | Name | Mm_Symbol | Hs_Symbol | UGCIuster | Mm_LLID | UGCIuster | Hs_LLID | Mm_ABI-Taqman |
|---|---|---|---|---|---|---|---|---|
| Mu_Eotaxin | Eotaxin | Ccl11 | CCL11 | Mm.4686 | 20292 | Hs.54460 | 6356 | Mm00441238_m1 |
| Mu_MIP-3b | MIP-3b | Ccl19 | CCL19 | | | Hs.50002 | 6363 | Mm00839967_g1 |
| Mu_MCP-1 | MCP-1 | Ccl2 | CCL2 | Mm.290320 | 20296 | Hs.303649 | 6347 | Mm00441242_m1 |
| Mu_TCA4/6Ckine | TCA4/6Ckine | Ccl21 | CCL21 | | | Hs.57907 | 6366 | Custom Design |
| Mu_MIP-1g | MIP-1g | Ccl9 | CCL9 | Mm.2271 | 20308 | | | Mm00441260_m1 |
| Mu_GCSF | GCSF | Csf3 | CSF3 | Mm.1238 | 12985 | Hs.2233 | 1440 | Mm00438334_m1 |
| Mu_MIP-2 | MIP-2 | Cxcl2 | CXCL1 | Mm.4979 | 20310 | Hs.789 | 2919 | Mm00436450_m1 |
| Mu_IL-6 | IL-6 | Il6 | IL6 | Mm.1019 | 16193 | | | Mm00446190_m1 |
| Mu_TRANCE | TRANCE | Tnfsf11 | TNFSF11 | Mm.249221 | 21943 | Hs.333791 | 8600 | Mm00441908_m1 |
| Mu_MCP-5 | MCP-5 | Ccl12 | CCL12 | Mm.867 | 20293 | | | Custom Design |

Reactions were performed in triplicate assays using representative RNA samples derived from three pools of five aortas as described previously (45-47).

[0127] Results

[0128] Temporal patterns of protein expression during atherogenesis in apoE-deficient mice. We have demonstrated previously (45) the extent of atherosclerotic lesions in this cohort of apoE-deficient mice. Given the extensive atherosclerotic lesions in the aorta as well as the aortic valve of the apoEdeficient mice, other vascular beds were not examined in these studies. To identify serum markers that correlate with the extent of atherosclerotic lesions, we have utilized a protein microarray to simultaneously measure the serum level of 30 inflammatory markers in apoE-deficient mice on a high-fat diet throughout the time course of disease development. For control groups, we utilized the apoE-deficient mice on normal diet as well as wild-type C57B1/6J and C3H/HeJ mice at two time points. Eight out of the thirty markers measured did not reveal significant serum expression levels. Twenty-two markers revealed unique time-related patterns of expression, some of which closely correlated with the extent of atherosclerotic lesions in the aorta previously described in this cohort of mice (FIG. 1) (45). These markers included various chemokines (Ccl2, Ccl9, Ccl11, Ccl19, Ccl21, Cxcl1, and Cxcl2) and several cytokines (Il2, Il4, Il5, Il6, Il10, and Il12) as well as other inflammatory proteins (Csf1, Csf2, Csf3, Ifng, Tnfsf11) and Vegfa. The vast majority of these markers had higher expression in apoE-deficient mice compared with control wild-type C57B1/6J and C3H/HeJ mice (FIG. 2). As described previously, under similar conditions, the control mice did not develop histologically evident atherosclerotic lesions (47); therefore, disease-related changes can be readily distinguished from other factors such as high-fat diet and aging.

[0129] Strain-specific protein expression with high-fat diet and aging. To account for atherosclerosis-independent variation in serum protein levels due to high-fat diet, aging, and genetic background, we used a number of controls including two previously well-studied mouse strains with different propensities to develop atherosclerosis, two different diets, and a longitudinal experimental design. We have shown previously that these control mice did not develop atherosclerotic lesions and thus were appropriate controls to account for these independent variables and possible interactions among them. As a result, we were able to identify differentially expressed proteins that are likely to be related to each variable and distinguish those specifically related to vascular disease processes in the apoE-deficient model. Simple ANOVA revealed at least 12 markers that were differentially expressed among the various diet-strain-time combinations (FIG. 2). To account for possible interactions among the three independent variables, we utilized three-way ANOVA. Three independent variables have three first-order interactions (time-strain, time-diet, strain-diet) and one second order interaction (time-strain-diet). Accounting for interactions among all three factors, we identified five proteins as differentially expressed (3-way ANOVA, P<0.05), including Ccl9, Ccl21, Ccl11, Csf1, and Il12b.

[0130] At the later time points, the high-fat diet also stimulated an inflammatory response in C57B1/6 wild-type mice, as represented by elevated serum levels for a number of inflammatory markers (FIG. 2). C3H/HeJ mice, on the other hand, had the lowest levels of inflammatory markers, even when on the high-fat diet. This finding is consistent with observations from our prior study comparing the aortic vascular wall gene expression in C3H/HeJ mice with that of C57B1/6J mice. That study concluded C57B1/6J mice have a higher genetic propensity for the expression of inflammatory markers in atherosclerosis.

[0131] Identification of time-specific protein expression signature pattern in mouse serum. Classification approaches to human cancer have provided significant insights regarding the clinical features of the tumor, including propensity to metastasis, medication responsiveness, and long-term prognosis (13, 23, 33, 43). For atherosclerosis, the clinical utility of classification algorithms will be in prediction of future events. In a previous study, we have applied classification algorithms to establish a panel of genes whose expression in the vessel wall could accurately classify disease severity in atherosclerotic vascular tissue derived from both mice and humans (45). In the current study, we have employed a similar approach to identify a minimal subset of serum proteins to accurately classify each proteomic experiment with one of the four defined stages of atherosclerosis in mice (FIG. 3). Here we utilized several well-known classification algorithms to identify the variables that can best distinguish between the mice with different disease states. These algorithms included RFE, SVM, and ANOVA. We also used PAM as an additional classification algorithm. These algorithms rank the proteins based on their utility for class discrimination between time points of 0, 10, 24, and 40 wk in apoE mice on high-fat diet. Our results demonstrated that a small subset of proteins (Ccl21, Ccl9, Csf3, Tnfsf11, Vegfa, Ccl11, Ccl2) were identified by a majority of the algorithms (FIG. 3A).

[0132] The predictive power of the signature pattern of this panel was superior to any single marker, since no individual marker was able to accurately classify the various disease states (analysis not shown). To determine the utility of serum levels of these proteins for classification of mice with different disease states, we utilized the SVM algorithm (linear kernel) to generate a confusion matrix using cross-validation with repeated splits into 75% training and 25% test sets. This algorithm demonstrated that the signature pattern of expression of these serum proteins can distinguish groups of mice with and without disease with up to 100% accuracy (FIG. 3B). Mice with intermediate stages of the disease are also distinguished from the other stages with a high degree of accuracy (79.6-100%) (FIG. 3B).

[0133] Cross-validation and analysis of independent data sets. A key proof of the utility of a defined set of classifier proteins is their ability to correctly classify data from an independent experiment. To validate the utility of the classifier proteins, we investigated their ability to accurately categorize an independent group of 16-wk-old apoE-deficient mice. Using the SVM classification algorithm, we were able to accurately classify each of the replicate experiments with the correct stage of the disease process (FIG. 3C). As indicated by the greatest correlation between protein expression in this independent group of mice and protein expression patterns in the original experimental group, aged 10 wk, the classifier proteins accurately matched this validation data set to the closest time point in the training set. It is important to note that, in this analysis, the independent data set (“test”) was not included in the training set (“known”).

[0134] Biomarker serum protein levels correlate with vascular wall gene expression levels. Those biomarkers whose circulating protein levels correlate with molecular events and expression levels in the vessel wall are expected to be most informative about vascular disease. To investigate such correlations, and to gain insights from the biomarker data regarding the pathophysiology of atherosclerosis, we have investigated vascular wall gene expression patterns for genes encoding informative biomarkers. Using quantitative real-time RT-PCR, we were able to correlate serum protein levels of several markers with their vascular RNA expression. Among the markers studied, Ccl21 (r=0.91), Ccl2 (r=0.97), Ccl19 (r=0.80), and Ccl11 (r=0.67) revealed a remarkably high correlation between time-related increase in gene expression and in serum levels (FIG. 4). Although these data do not exclude expression of these markers in other tissues, they suggest that expression is particularly associated with the atherosclerotic vascular wall. Pearson correlation values were determined comparing normalized average ratios of serum protein level, vascular gene expression, and time on high-fat diet (log10 of no. of wk on diet). A correlation coefficient (r) between mRNA expression in an atherosclerotic vessel wall and serum levels of the encoded protein are considered significant if r is at least 0.6; at least 0.7; at least 0.8; at least 0.9, or higher.

[0135] Discussion

[0136] There is an obvious need for improved tools to diagnose and treat preclinical atherosclerosis. At present, although insights into mechanisms and circumstances of atherosclerosis are increasing, our methods for identifying the high-risk patients and predicting the efficacy of measures to prevent coronary artery disease are still inadequate. Because of a lack of highly sensitive and specific biomarkers for atherosclerotic disease, the first clinical presentation of more than one-half of these patients is either myocardial infarction or death (19, 20). Several inflammatory markers have been studied in the context of atherosclerosis, both in mice and humans, and the results have strengthened the inflammatory hypothesis of atherosclerosis (38). However, each study has focused on only a few individual markers, some lack longitudinal design, and only a few demonstrate direct correlation with gene expression at the vascular level (25, 29, 34).

[0137] Currently, the general markers of inflammation, although proposed for use in risk stratification of patients with atherosclerotic disease, are not used in the screening of asymptomatic patients for accurate disease classification and, more importantly, for prediction of first cardiovascular events. The lack of specificity of markers such as C-reactive protein (CRP) and fibrinogen may stem from the fact that they are not derived from the vasculature and may signal inflammation in any organ. It is also possible that, because of heterogeneity among the population at risk, a single marker cannot provide sufficient information for accurate prediction of disease. For similar reasons, these general markers of inflammation such as CRP and sedimentation rate (ESR) have been long abandoned as specific diagnostic markers in other inflammatory diseases such as lupus (SLE) and rheumatoid arthritis (RA).

[0138] We have shown previously with RNA profiling studies of mouse aortic tissues, with the same experimental design as that used here, that it is possible to identify a small number of genes capable of classifying disease severity (45). Obviously, given that the vascular tissue is not readily accessible, identification of protein markers in the serum can have practical implications in developing diagnostic tools for diagnosis of coronary artery disease in humans. In the work reported here, we have investigated inflammatory serum biomarker abundance patterns and whether a subset of these biomarkers can be used to classify animals with respect to disease progression. Scientifically, these two types of information are complementary and provide significantly greater insights into the detailed molecular mechanisms of the disease, from gene transcription to translation to intracellular pathways to secretion of mediators into the serum. As noted above, identification of the serum marker profile for a given disease state allows the development of noninvasive diagnostic approaches that can be used in humans. Because we also have a detailed microarray-based picture of the transcriptional landscape in the diseased tissue, we can use this view to assess upstream components in the pathways that lead to inflammatory mediator expression, the first step in developing highly targeted therapeutics. Indeed, serum assays such the one described here can then be used to assay the ultimate effects of such therapeutics. We utilized protein microarrays for simultaneous protein expression profiling of sera from various mouse models of atherosclerosis with different susceptibilities and severities of atherosclerosis. Using classification algorithms similar to those utilized in classifying cancer progression and type, we were able to show that the unique signature patterns of these vascular-derived biomarkers could accurately predict different severities of atherosclerotic disease in mice.

[0139] In the prior study (45), our analysis revealed that the microarray gene expression profile of the independent data set derived from the 16-wk time point associated more closely with the 24-wk time point, whereas, in the present study, the protein profiles of the similar time point correlated more closely with the 10-wk time point. This finding may offer a number of interesting hypotheses. Given the limited number of probes in the current protein microarray, the protein classifiers in the current study are different from the gene classifiers identified in the prior study. It is also possible that time-related increase in serum protein expression lags behind changes at the level of vascular wall gene expression.

[0140] Because there may not be a direct correlation between vascular gene expression and serum protein levels for the same markers because of various factors such as posttranscriptional modification and protein stability, an important validation of these data was the demonstration of disease-related vascular gene expression for a subset of these markers. We show a correlation between the time-related serum levels of these markers and their gene expression in the vessel wall. The time-dependent correlation of disease progression and vascular gene expression suggests that the primary site of marker production is the vessel wall. However, the vasculature may not be the sole source of the inflammatory markers, and it is possible that other tissues such as muscle, spleen, adipose tissue, or liver may contribute to the serum levels of these markers, as suggested by previous reports (22). One marker evaluated in our studies, Il6, is known to be produced in muscle and liver as well as the vascular wall. Interestingly, the serum abundance of Il6 did not correlate with the temporal development of disease, correlating only weakly with gene expression in the vascular wall. These findings suggest that other tissues may contribute to serum levels of some markers, such as Il6, but that the levels of these were not correlated with the disease state studied and do not contribute to the classification panel.

[0141] The serum level of some of the systemic inflammatory markers may also be confounded by differences in metabolic parameters among the various mice studied. It has been demonstrated that a high-fat diet stimulates an inflammatory response in the liver (22). The level of expression of these genes remains high throughout the high-fat feeding period. We controlled for these systemic effects by comparing mice fed high-fat diets during both the early and late atherosclerosis stages, so that serum lipid levels are constant (14) but the degree of atherosclerosis changes. These metabolic parameters therefore have a poor correlation with the serum level of markers which demonstrate a linear increase with time. Thus temporal changes in vascular-derived marker serum levels correlate more closely with the degree of atherosclerosis and not lipid levels.

[0142] The markers identified in this study provide strong support for the inflammatory nature of atherosclerosis, and the individual markers identified offer some insights into the underlying mechanisms of the disease in mice. These markers include important chemokines specific for both macrophages and T cells. Ccl21 (originally Exodus-2/SLC/6Ckine/TCA4) is the most powerful chemoattractant yet identified for T cells and plays an important role in T cell adhesion and trafficking from the vasculature to tissue sites of inflammation (30). Related chemokines Cxcl2 and Ccl19, also expressed at high levels in our experiments, mediate the firm adherence of T cells to the endothelium by stimulating lymphocyte function-associated antigen-1 (LFA-1) (6, 15). Importantly, Ccl21 is not thought to play a role in T cell effector function during a normal immune response but has been found to be highly induced in endothelial cells in T cell-mediated autoimmune diseases (8). Therefore, the novel finding of disease-related high-level circulating Ccl21, and highly correlated expression of CCL21 in the diseased vessel wall, raises the question of whether autoimmune pathways may play a role in the development of atherosclerosis in mice (44). Ccl21 levels in human disease remain to be measured. Ccl19 [macrophage inflammatory protein (MIP)-3b] has a somewhat similar function to Ccl21. It binds the same receptor, Ccr7, and is a potent chemoattractant for both T cells and B cells. But unlike Ccl21, it appears to also play a role in normal T cell function. Its expression in the atherosclerotic vasculature and the high correlation between serum levels and aortic gene expression are both novel findings.

[0143] The roles of Ccl2 (Mcp1 or JE) (3) and Ccl11 (Eotaxin) (10, 17) in atherosclerosis are well established and confirm our findings. We have also documented that the serum levels of both Cxcl2 (MIP-2) and Cxcl1 (KC) are elevated in sera of atherosclerotic mice, consistent with serum levels described by other investigators (29). As was described in that study (29), we found levels of Cxcl2 (MIP-2) to be less reliable. Moreover, given the lower correlation of serum levels with aortic gene expression, it appears that significant amounts of Cxcl2 may be produced by nonvascular tissues, confirming previous observations (29). Nonetheless, we found that the correlation with vascular gene expression of Cxcl2 was still better than other markers such as Il6 and Csf3. Despite the increased levels of Cxcl1 (KC), we did not find this marker to be a consistent predictor of disease, which is consistent with a recent study (34). Vegfa has recently been described as an independent predictor of acute coronary syndrome (18, 24). Our study supports Vegfa as a reasonable classifier in at least three of the algorithms used, confirming its potential utility in monitoring human disease. Another very interesting finding in our study is the role of Tnfsf11 (TRANCE) in atherosclerosis. Tnfsf11 is a member of tumor necrosis factor (TNF) cytokine family and a ligand for osteoprotegerin which functions as a key factor for osteoclast differentiation and activation. This protein is also known to be a dentritic cell survivor factor and is involved in the regulation of T cell-dependent immune response. Osteoprotegerin has recently been identified as a potential risk factor for progressive atherosclerosis and cardiovascular disease in humans (21, 37). Other cytokines that have been speculated to play a role in atherosclerosis include Il12b (25) and Il5 (9). Although we demonstrated their serum level to be predictive of disease state, we failed to confirm vascular-specific expression of Il12b in atherosclerotic lesions.

[0144] In summary, the top serum protein classifiers identified in our study encompass a wide range of atherosclerotic biological processes including macrophage chemoattraction (Ccl9, Ccl2), T cell chemokine activity (Ccl21 and Ccl19), innate immunity (I15), vascular calcification (Tnfsf11), angiogenesis (Vegfa), and high fat-induced inflammation (Cxcl1 and possibly leptin). The signature pattern derived from simultaneous measurement of these markers, which represent diverse atherosclerosis-related biological processes, will likely add to the specificity needed for diagnosis of atherosclerotic disease. Further validation of this approach with appropriate prospective trials in human subjects has lead to improved screening diagnostic tools in atherosclerosis and coronary artery disease, as described in Examples 3 through 12, below.

### REFERENCES

[0145] 1. Fact Book Fiscal Year 2003. Bethesda, Md.: National Heart, Lung, and Blood Institute, 2003.
[0146] 2. Morbidity and Mortality Chartbook, 2002. Bethesda, Md.: National Heart, Lung, and Blood Institute, 2002.
[0147] 3. Aiello R J, Bourassa P A, Lindsey S, Weng W, Natoli E, Rollins B J, and Milos P M. Monocyte chemoattractant protein-1 accelerates atherosclerosis in apolipoprotein E-deficient mice. Arterioscler Thromb Vasc Biol 19: 1518-1525, 1999.
[0148] 4. Burges C J C. A tutorial on support vector machines for pattern recognition. Data Mining Knowledge Discov 2: 121-167, 1998.
[0149] 5. Bursill C A, Channon K M, and Greaves D R. The role of chemokines in atherosclerosis: recent evidence from experimental models and population genetics. Curr Opin Lipidol 15: 145-149, 2004.
[0150] 6. Campbell J J, Hedrick J, Zlotnik A, Siani M A, Thompson D A, and Butcher E C. Chemokines and the arrest of lymphocytes rolling under flow conditions. Science 279: 381-384, 1998.
[0151] 7. Chen M M, Ashley E A, Deng D X, Tsalenko A, Deng A, Tabibiazar R, Ben-Dor A, Fenster B, Yang E, King J Y, Fowler M, Robbins R, Johnson F L, Bruhn L, McDonagh T, Dargie H, Yakhini Z, Tsao P S, and Quertermous T. Novel role for the potent endogenous inotrope apelin in human cardiac dysfunction. Circulation 108: 1432-1439, 2003.
[0152] 8. Christopherson K W 2nd, Hood A F, Travers J B, Ramsey H, and Hromas R A. Endothelial induction of the T-cell chemokine CCL21 in T-cell autoimmune diseases. Blood 101: 801-806, 2003.
[0153] 9. Daugherty A, Rateri D L, and King V L. IL-5 links adaptive and natural immunity in reducing atherosclerotic disease. J Clin Invest 114: 317-319, 2004.
[0154] 10. Economou E, Tousoulis D, Katinioti A, Stefanadis C, Trikas A, Pitsavos C, Tentolouris C, Toutouza M G, and Toutouzas P. Chemokines in patients with ischaemic heart disease and the effect of coronary angioplasty. Int J Cardiol 80: 55-60, 2001.
[0155] 11. Feezor R J, Baker H V, Xiao W, Lee W A, Huber T S, Mindrinos M, Kim R A, Ruiz-Taylor L, Moldawer L L, Davis R W, and Seeger J M. Genomic and proteomic determinants of outcome in patients undergoing thoracoabdominal aortic aneurysm repair. J Immunol 172: 7103-7109, 2004.
[0156] 12. Glass C K and Witztum J L. Atherosclerosis. The road ahead. Cell 104:503-516, 2001.
[0157] 13. Golub T R, Slonim D K, Tamayo P, Huard C, Gaasenbeek M, Mesirov J P, Coller H, Loh M L, Downing J R, Caligiuri M A, Bloomfield C D, and Lander E S. Molecular classification of cancer: class discovery and class prediction by gene expression monitoring. Science 286: 531-537, 1999.
[0158] 14. Grimsditch D C, Penfold S, Latcham J, Vidgeon-Hart M, Groot P H, and Benson G M. C3H apoE(_/_) mice have less atherosclerosis than C57BL apoE(_/_) mice despite having a more atherogenic serum lipid profile. Atherosclerosis 151: 389-397, 2000.
[0159] 15. Gunn M D, Tangemann K, Tam C, Cyster J G, Rosen S D, and Williams L T. A chemokine expressed in lymphoid high endothelial venules promotes the adhesion and chemotaxis of naive T lymphocytes. Proc Natl AcadSci USA 95: 258-263, 1998.
[0160] 16. Guyon I, Weston J, Barnhill S, and Vapnik V. Gene selection for cancer classification using support vector machines. Machine Learning 46: 389, 2002.
[0161] 17. Haley K J, Lilly C M, Yang J H, Feng Y, Kennedy S P, Turi T G, Thompson J F, Sukhova G H, Libby P, and Lee R T. Overexpression of eotaxin and the CCR3 receptor in human atherosclerosis: using genomic technology to identify a potential novel pathway of vascular inflammation. Circulation 102: 2185-2189, 2000.
[0162] 18. Heeschen C, Dimmeler S. Hamm C W, Fichtlscherer S, Simoons M L, and Zeiher A M. Pregnancy-associated plasma protein-A levels in patients with acute coronary syndromes: comparison with markers of systemic inflammation, platelet activation, and myocardial necrosis. J Am Coll Cardiol 45: 229-237, 2005.
[0163] 19. Kannel W B and McGee D L. Epidemiology of sudden death: insights from the Framingham Study. Cardiovasc Clin 15: 93-105, 1985.
[0164] 20. Kannel W B and Schatzkin A. Sudden death: lessons from subsets in population studies. J Am Coll Cardiol 5: 141B-149B, 1985.
[0165] 21. Kiechl S, Schett G, Wenning G, Redlich K, Oberhollenzer M, Mayr A, Santer P, Smolen J, Poewe W, and Willeit J. Osteoprotegerin is a risk factor for progressive atherosclerosis and cardiovascular disease. Circulation 109: 2175-2180, 2004.
[0166] 22. Kim S, Sohn I, Ahn J I, Lee K H, and Lee Y S. Hepatic gene expression profiles in a long-term high-fat diet-induced obesity mouse model. Gene 340: 99-109, 2004.
[0167] 23. Lapointe J, Li C, Higgins J P, van de Rijn M, Bair E, Montgomery K, Ferrari M, Egevad L, Rayford W, Bergerheim U, Ekman P, DeMarzo A M, Tibshirani R, Botstein D, Brown P O, Brooks J D, and Pollack J R. Gene expression profiling identifies clinically relevant subtypes of prostate cancer. Proc Natl Acad Sci USA 101: 811-816, 2004.
[0168] 24. Lee S H, Wolf P L, Escudero R, Deutsch R, Jamieson S W, and Thistlethwaite P A. Early expression of angiogenesis factors in acute myocardial ischemia and infarction. N Engl J Med 342: 626-633, 2000.
[0169] 25. Lee T S, Yen H C, Pan C C, and Chau L Y. The role of interleukin 12 in the development of atherosclerosis in ApoE-deficient mice. Arterioscler Thromb Vasc Biol 19: 734-742, 1999.
[0170] 26. Libby P. Inflammation in atherosclerosis. Nature 420: 868-874, 2002.
[0171] 27. Lucas A D and Greaves D R. Atherosclerosis: role of chemokines and macrophages. Expert Rev Mol Med 2001: 1-18, 2001.
[0172] 28. Luster A D. Chemokines-chemotactic cytokines that mediate inflammation. N Engl J Med 338: 436-445, 1998.
[0173] 29. Murphy N, Bruckdorfer K R, Grimsditch D C, Overend P, Vidgeon-Hart M, Groot P H, Benson G M, and Graham A. Temporal relationships between circulating levels of CC and CXC chemokines and developing atherosclerosis in apolipoprotein E*3 Leiden mice. Arterioscler Thromb Vasc Biol 23: 1615-1620, 2003.
[0174] 30. Nagira M, Imai T, Hieshima K, Kusuda J, Ridanpaa M, Takagi S, Nishimura M, Kakizaki M, Nomiyama H, and Yoshie O. Molecular cloning of a novel human CC chemokine secondary lymphoid-tissue chemokine that is a potent chemoattractant for lymphocytes and mapped to chromosome 9p13. J Biol Chem 272: 19518-19524, 1997.
[0175] 31. Nakashima Y, Plump A S, Raines E W, Breslow J L, and Ross R. ApoE-deficient mice develop lesions of all phases of atherosclerosis throughout the arterial tree. Arterioscler Thromb 14: 133-140, 1994.
[0176] 32. Napoli C, Palinski W, Di Minno G, and D'Armiento F P. Determination of atherogenesis in apolipoprotein E-knockout mice. Nutr Metab Cardiovasc Dis 10: 209-215, 2000.
[0177] 33. Paik S, Shak S, Tang G, Kim C, Baker J, Cronin M, Baehner F L, Walker M G, Watson D, Park T, Hiller W, Fisher E R, Wickerham D L, Bryant J, and Wolmark N. A multigene assay to predict recurrence of tamoxifen-treated, node-negative breast cancer. N Engl J Med 351: 2817-2826, 2004.
[0178] 34. Parkin S L, Pritchett J P, Grimsditch D C, Bruckdorfer K R, Sahota P K, Lloyd A, Overend P, and Benson G M. Circulating levels of the chemokines JE and KC in female C3H apolipoprotein-E-deficient and C57BL apolipoprotein-E-deficient mice as potential markers of atherosclerosis development. Biochem Soc Trans 32: 128-130, 2004.
[0179] 35. Ramaswamy S, Tamayo P, Rifkin R, Mukherjee S, Yeang C H, Angelo M, Ladd C, Reich M, Latulippe E, Mesirov J P, Poggio T, Gerald W, Loda M, Lander E S, and Golub T R. Multiclass cancer diagnosis using tumor gene expression signatures. Proc Natl Acad Sci USA 98:15149-15154, 2001.
[0180] 36. Reddick R L, Zhang S H, and Maeda N. Atherosclerosis in mice lacking apo E. Evaluation of lesional development and progression. Arterioscler Thromb 14: 141-147, 1994.
[0181] 37. Rhee E J, Lee W Y, Kim S Y, Kim B J, Sung K C, Kim B S, Kang J H, Oh K W, Oh E S, Baek K H, Kang M I, Woo H Y, Park H S, Kim S W, Lee M H, and Park J R. The relationship of serum osteoprotegerin levels with coronary artery disease severity, left ventricular hypertrophy and C-reactive protein. Clin Sci (Lond) 108: 237-243, 2004.
[0182] 38. Ridker P M, Brown N J, Vaughan D E, Harrison D G, and Mehta J L. Established and emerging plasma biomarkers in the prediction of first atherothrombotic events. Circulation 109: IV6-IV19, 2004.
[0183] 39. Ridker P M, Cannon C P, Morrow D, Rifai N, Rose L M, McCabe C H, Pfeffer M A, and Braunwald E. C-reactive protein levels and outcomes after statin therapy. N Engl J Med 352: 20-28, 2005.
[0184] 40. Rifai N and Ridker P M. Inflammatory markers and coronary heart disease. Curr Opin Lipidol 13: 383-389, 2002.
[0185] 41. Ross R. Atherosclerosis—an inflammatory disease. N Engl J Med 340: 115-126, 1999.
[0186] 42. Saadeddin S M, Habbab M A, and Ferns G A. Markers of inflammation and coronary artery disease. Med Sci Monit 8: RA5-RA12, 2002.
[0187] 43. Sorlie T, Perou C M, Tibshirani R, Aas T, Geisler S, Johnsen H, Hastie T, Eisen M B, van de Rijn M, Jeffrey S S, Thorsen T, Quist H, Matese J C, Brown P O, Botstein D, Eystein Lonning P, and Borresen-Dale A L. Gene expression patterns of breast carcinomas distinguish tumor subclasses with clinical implications. Proc Natl Acad Sci USA 98: 10869-10874, 2001.
[0188] 44. Stemme S, Faber B, Holm J, Wiklund O, Witztum J L, and Hansson G K. T lymphocytes from human atherosclerotic plaques recognize oxidized low density lipoprotein. Proc Natl Acad Sci USA 92: 3893-3897, 1995.
[0189] 45. Tabibiazar R, Wagner R A, Ashley E A, King J Y, Ferrara R, Spin J M, Sanan D A, Narasimhan B, Tibshirani R, Tsao P S, Efron B, and Quertermous T. Signature patterns of gene expression in mouse atherosclerosis and their correlation to human coronary disease. Physiol Genomics 22: 213-226, 2005.
[0190] 46. Tabibiazar R, Wagner R A, Liao A, and Quertermous T. Transcriptional profiling of the heart reveals chamber-specific gene expression patterns. Circ Res 93: 1193-1201, 2003.
[0191] 47. Tabibiazar R, Wagner R A, Spin J M, Ashley E A, Narasimhan B, Rubin E M, Efron B, Tsao P S, Tibshirani R, and Quertermous T. Mouse strain-specific differences in vascular wall gene expression and their relationship to vascular disease. Arterioscler Thromb Vasc Biol 25: 302-308, 2005.
[0192] 48. Tibshirani R, Hastie T, Narasimhan B, and Chu G. Diagnosis of multiple cancer types by shrunken centroids of gene expression. Proc Natl Acad Sci USA 99: 6567-6572, 2002.
[0193] 49. Wagner R A, Tabibiazar R, Powers J, Bernstein D, and Quertermous T. Genome-wide expression profiling of a cardiac pressure overload model identifies major metabolic and signaling pathway responses. J Mol Cell Cardiol 37: 1159-1170, 2004.
[0194] 50. Yeang C H, Ramaswamy S, Tamayo P, Mukherjee S, Rifkin R M, Angelo M, Reich M, Lander E, Mesirov J, and Golub T. Molecular classification of multiple tumor types. Bioinformatics 17, Suppl 1: S316S322, 2001.

### Example 2

### Protein Microarray Analysis

[0195] To assess the performance of an antibody array of different chemokines (Eotaxin, IP-10, MCP-1, MCP-2, MCP-3, MCP-4, IL-8, MIP1a, and RANTES), we used a commercially available Schleicher and Schuell protein microspot array (FastQuant Human Chemokine, S&S Bioscences Inc., Keene, N.H., US). This array platform utilizes multiple monoclonal highly-specific antibodies spotted onto standard microscope slides coated with a 3-D nitrocellulose surface. with human circulating samples, we chose a group of 11 cases known to have severe coronary artery disease by history and unequivocal positive exercise test or coronary catheterization, and 9 controls with no history and negative exercise or coronary angiogram. Circulating samples were collected and kept frozen at −80C, then thawed immediately prior to use on the array. Each sample was incubated on two replicate arrays. The 11 patient samples and 9 controls were evaluated on a total of 8 slides (8 arrays per slide) made in one print run.

[0196] Reproducibility between arrays was good, as evidenced by replicate experiments done for each sample in the study. For each antibody, a median background subtracted signal of 4 replicate features printed on the same array was plotted against each median obtained in the replicate experiment. A correlation coefficient of 0.99 between measurements with replicate experiments was common, indicating excellent agreement between the two sets of array data.

[0197] In the analysis that follows, each analyte circulating measurement represents the average of four measurements on a single circulating sample, from which was subtracted corresponding average measurements from the blank slide, and analyses conducted with log(10) values of this difference. Protein levels in the group of 9 control samples were compared to protein levels in the group of 11 cases. For each protein, distribution of protein levels in case and control groups were compared using the Gaussian error score, which measures the overlap of normal distributions fit to values in each group of samples, and graphed as a heat map. The Gaussian plot shows the actual distribution of protein levels in two groups for the MMP-2/TIMP-2 complex. There is not one single protein measurement that can provide clear separation of the small numbers of individuals in these groups, and the overlapping signal distribution is clearly seen with the Gaussian plots. While the goal of this work was not to identify classification algorithms, it was possible to classify case and control samples by combining a small number of the top proteins with Fisher's Linear Discriminant Analysis.

[0198] To validate the findings from the array, we used the standard ELISA sandwich format assay, employing the same capture and detection antibodies that are used with the array. Although the antibody pairs used in the array are from commercial sources and have already been validated for ELISA by the supplier, they were checked prior to use in the array to ensure that they were working according to sensitivity specifications. Case and control human circulating samples are analyzed with ELISA methodology, and the ELISA data compared with the array data. The comparative data for one such analyte, circulating leptin showed a good correlation, whether the ELISA was performed on 10-fold or 20-fold dilutions of the samples.

### Example 3

### Signature Pattern of Circulating Inflammatory markers for Accurate Prediction and Diagnosis of Human Coronary Artery Disease

[0199] Serum Biomarker Data from Human Pilot Study

[0200] Given the encouraging results obtained in Examples 1 and 2, we examined whether protein microarrays can be used to identify signature patterns of serum inflammatory proteins that can serve as highly sensitive and specific markers of atherosclerotic disease in humans. To investigate this approach we designed a nested case-control study by selecting 51 patients with clinically significant CAD and 44 healthy control subjects from a large clinical epidemiological study designed to examine risk factors and genetic determinants of atherosclerosis. Serum samples collected at the time of enrollment were used for simultaneous measurement of multiple inflammatory markers using a protein microarray. Concentrations of a subset of the analytes tested were significantly higher in case subjects. Classification algorithms using the serum expression profile of these markers accurately stratified CAD subjects compared to controls. Moreover, the unique signature pattern of the biomarkers significantly improved the predictive capacity of other known markers of CAD. In this pilot study we were able to demonstrate that a signature pattern of circulating inflammatory markers accurately identifies patients with atherosclerotic disease.

[0201] Introduction

[0202] Atherosclerotic cardiovascular disease (ASCVD) is the primary cause of morbidity and mortality in the developed world^{1, 2}. However, due to lack of accurate early diagnostic markers, the first clinical presentation of more than half of the patients with coronary artery disease (CAD) is either myocardial infarction or death^{3, 41, 2}. Inflammation has been implicated in all stages of ASCVD and is considered to be the pathophysiological basis of atherogenesis, providing a potential marker of the disease process^{5 6 7}.

[0203] Elevated serum inflammatory biomarkers have been shown to stratify cardiovascular risk and assess response to therapy in large epidemiological studies⁸⁹. Although potentially useful in risk stratification, the current inflammatory markers lack sufficient disease specificity to be used as a screening tool in CAD diagnostics. The lack of accuracy of current markers, such as C-reactive protein (CRP) and fibrinogen, may stem from the fact that they are not primarily derived from the vascular wall nor produced primarily by cells involved in the vascular inflammatory process, and may signal inflammation in a number of different organs and tissues. In addition, it is also possible that, due to the heterogeneity of the disease phenotype in the population at risk, a single marker could not provide sufficient information for an accurate assessment of the vascular damage in coronary circulation. For similar reasons, the general markers of inflammation such as CRP and erythrocytes sedimentation rate (ESR) have been long abandoned as specific diagnostic markers in other inflammatory diseases such as lupus (SLE) and rheumatoid arthritis (RA) although they remain tools to risk stratification and response to therapy in clinical practice

[0204] Thus, there is a critical need for biomarkers that more accurately reflect ASCVD activity, and can be used as highly sensitive and specific assays for patient identification. We hypothesize that unique signature patterns of circulating inflammatory proteins can be used to better identify individuals with CAD. To address this issue, we designed a nested case-control study by selecting 51 patients with recent myocardial infarction (MI) and 44 healthy control subjects from the ADVANCE Study ((Atherosclerotic Disease, VAscular FuNction, & GenetiC Epidemiology), a population-based study on the genetic susceptibility of atherosclerosis. Using serum samples collected at the time of enrolment, we performed a simultaneous measurement of nine inflammatory markers with a commercially available protein microarray. For data analysis we also included extensive clinical variables such as medical history, medication profile, personal and family history (first degree relatives) as well as plasma glucose, insulin, and C-reactive protein (CRP) levels. Statistical algorithms identified a signature pattern of protein biomarkers that, when used in combination with other clinical variables, accurately classified individuals with CAD and controls.

[0205] Methods

[0206] Patient Selection and Clinical Data

[0207] All study protocols were reviewed and approved by Institution Review Board. Patients were randomly selected from two different groups of the ADVANCE study cohort, a larger genetic epidemiological study conducted in collaboration between Stanford Cardiovascular division and the Northern California Kaiser Permanente Medical Care Program, Division of Research, and designed to investigate the genetic determinants of cardiovascular disease. ADVANCE recruited a total of 3666 individuals in the San Francisco Bay Area, who were stratified based on sex and age to represent the Northern California population. All potential subjects gave written, informed consent to participate and the study protocol was approved by the Human Subjects Committees of both Stanford University and Kaiser Division of Research. The ADVANCE study cohort is structured in well-characterized clinical groups: 743 young, apparently healthy controls (group 1); 1023 older controls (group 2); 503 young CAD cases (group 3); 926 older newly diagnosed CAD cases, with documented first-onset myocardial infarction (MI) at the time of enrollment with median time of event to enrollment of 3.4 months (group 4); and 471 older cases of first-onset stable angina (group 5). From group 2 and 4 we selected a total of 95 Caucasian subjects, 44 MI cases and 51 controls, by gender-stratified random sampling. Extensive ADVANCE study database includes clinical variables such as medical history, medication profile, personal and family history (first degree relatives) as well as plasma glucose, insulin, C-reactive protein (CRP) levels, and lipid profile. Lipid profiles were available in group 2 only. Case subjects included 45-75 years old men and 55-75 women with first presentation of CAD as an acute MI. These subjects were identified by presence of a primary hospital discharge diagnosis code of 410.x and elevated cardiac enzymes during hospitalization or within 72 hours prior to admission (either troponin I level≧4.0 ng/mL or, at least, one elevated value of CK-MB≧5.6 ng/ml or CK-MB %≧3.3 ng/mL). Serum was collected between 7 to 20 weeks after the index event (median 3.4 months). A committee of ADVANCE study investigators reviewed the clinical documentation to confirm the diagnosis. Controls were 60 to 69 years old individuals, of both sexes, without clinical history of any ASCVD manifestation or other major diseases, as reported by their primary care physician and the Kaiser Permanente database. Clinical data and fasting serum specimens were collected during the first visit after enrolment to ADVANCE study. Plasma concentrations of glucose and insulin were measured with standard methodologies. CRP was determined by high-sensitivity ELISA assay.

[0208] Protein Microarray Hybridization and Data Processing

[0209] To assess the concentrations of 9 different chemokines (Eotaxin, IP-10, MCP-1, MCP-2, MCP-3, MCP-4, IL-8, MIP1a, and RANTES), we used a commercially available Schleicher and Schuell protein microspot array (FastQuant Human Chemokine, S&S Bioscences Inc., Keene, N.H., US). This array platform utilizes multiple monoclonal highly-specific antibodies spotted onto standard microscope slides coated with a 3-D nitrocellulose surface. The sensitivity and specificity of these markers and correlation to conventional ELISA has been demonstrated previously. Lack of cross-reactivity among these markers has been established previously. Plasma samples are hybridized to protein arrays using manufacturer's instructions, followed by addition of a biotinylated secondary antibody and Cy5-streptavidine conjugate. Resulting fluorescence intensity was measured using an Axon Genepix 4000B microarray scanner in conjunction with a feature extraction software (Array Vision Fast 8.0, S&S Biosciences) to convert the scanned image into numeric intensities. Absolute concentrations were measured by interpolation of intensity values with internal standard references run in parallel. Fast Quant protein arrays present control variability ranging from 3 to about 15% and sensitivity from 1 to 10 pg/ml, depending on the specific analyte. Accuracy of FastQuant protein arrays are comparable to the correspondent ELISA determinations^{10, 11} with a similar linear range. Detailed supplemental methods and quality control results for the current study are provided online on publisher's website (see supplemental materials for Ardigo, Tabibiazar, et al., “Signature Patterns of Circulating Biomarkers Accurately Predict Presence of Coronary Artery Disease”), including array reproducibility and standard curves.

[0210] Numerical raw data were subsequently both analyzed in local Windows workstations and migrated into an Oracle relational database specifically designed for microarray data analysis. For technical reasons, RANTES and IL-8 were discounted from further analysis. The RANTES standard curve was non-sigmoidal and, therefore, did not have a linear portion for calculating concentrations. In both case subjects and control samples, most of the IL-8 values were outside the standard curve limits.

[0211] Statistical Analysis

[0212] Differences in clinical characteristics between the two groups were investigated using Mann-Whitney's U and Chi-square tests, for continuous and nominal variables respectively. The level of significance was computed by Monte Carlo approach. A general linear model (GLM) multivariate analysis was performed to identify differences in chemokines between cases and controls, before and after adjustment for clinical variables unequally distributed between the two groups at U and Chi tests.

[0213] The diagnostic performance of chemokines was tested by Receiver Operating Characteristic (ROC) curves.¹² Logistic regression (LR) analysis was used to verify the contribution of chemokine values in the discrimination between cases and controls. Age, gender, and clinical variables significantly different between the two groups in the bivariate analysis were also included into the models as independent variables. Since the difference between the two groups in the intake of medications typically prescribed to CAD patients, such as ACE-inhibitors and statins, would have introduced spurious predictors of disease in the model, we decided to exclude any information about pharmacological treatments from the analysis.

[0214] Three different LR models were created to manage the presence of several issues: relatively elevated number of independent variables, presence of missing values (about 10 values in 8 subjects), and co-linearity among chemokine concentrations. A stepwise model, with forward selection of the variables (entry probability 0.05; removal probability 0.15), was performed twice: without and with estimation of the missing values by conditional mean. A third LR model, specifically conceived to address the colinearity issue, included a chemokine score along with the clinical variables. The score computation consisted of recoding each chemokine concentration on a 1 to 10 scale (based on deciles) and then averaging the scale values for any available chemokine values. Full-length description of tests issues, models building process, and estimation procedure for missing values, is available on-line as supplemental material. U and Chi-square tests, GLM, ROC, and LR were performed using SPSS statistical software for Windows, version 12.0 (SPSS Inc., Chicago, Ill.).

[0215] To overlook data structure, we performed a two dimensional hierarchical clustering analysis (2D-HC). 2D-HC was built using the open-source software TMev, ver. 3.0 (TM4 suite, The Institute for Genomic Research, Rockville, Md.)¹³. Analysis was conducted using complete linkage and Pearson's correlation as distance metrics. To determine the directions of maximum variance in our data, we employed principal component analysis (PCA) in log2 base.

[0216] Protein Selection Algorithms and Disease State Classification:

[0217] Protein selection and classification algorithms have been described previously (Tabibiazar 2005 Physiol Genomics. 2005 Jul. 14; 22(2):213-26), incorporated by reference). Briefly, for supervised analyses we utilized a number of classification algorithms to rank genes based on their utility for class discrimination between case and control subjects. The algorithms used in this analysis included Support Vector Machine (SVM)¹⁴ and Recursive Feature Elimination (RFE)¹⁵, a recursive version of SVM in which variables are ranked repeatedly while a fixed fraction of worst scorers are removed each time¹⁶. SVM-RFE was used to determine the optimal number of ranked variables to classify the experiments into their correct groups at minimal error rate. The optimal error rate or misclassification is calculated by 1000-times reiterated cross-validation, with 25% of the experiments as the test group and the rest as the training group. As internal validation for the SVM results we also used the following supervised classification algorithms: Classification and Regression Tree (CART), Linear Discriminant Analysis (LDA), and Logistic Regression (previously described in this section). CART is a flexible hierarchical system of classification by a sequence of binary if-then logical conditions that allows setting the degree of individualization of the results and the proportional cost of misclassification. To get a highly accurate classification, we designed terminal nodes to contain pure subgroups or no more than 5 subjects. A priori information included equal class sizes with equal misclassification costs for each of the two classes. Cross-validation of the results was performed by multiple random permutations of 10% of the subjects.

[0218] Results

[0219] Clinical Characteristics of the Subjects

[0220] As shown in FIG. 5, the case and control groups differ in a number of important characteristics reflecting well established risk factors for CAD. Case subjects have a more pronounced insulin-resistant phenotype, with higher plasma insulin concentrations, slightly higher BMI (although not significant), larger waist circumference, and increased prevalence of dyslipidemia. However, blood glucose levels and prevalence of diabetes were similar between the two groups. Blood pressure, both systolic and diastolic, was significantly lower in patients than controls, despite a more frequent history of hypertension. This fact can be explained, at least in part, by a greater usage of antihypertensive medications (96.8% vs 43.2%) and medications usually prescribed in secondary prevention, such as ACE-inhibitors, beta-blockers, statins, and aspirin. Moreover, although coronary disease was more prevalent in first degree relatives of CAD patients than controls, family history of diabetes, dyslipidemia, hypertension, and stroke were not significantly different between the two groups. It is interesting to note that, despite a clear difference between the two groups in vascular and metabolic phenotype, no difference in CRP concentration was detectable.

[0221] Circulating Inflammatory Markers in Cases and Controls

[0222] Although CRP was not different between the two groups, multivariate GLM analysis indicated that the other circulating inflammatory markers were higher in cases compared with controls (FIG. 6), even after adjustment for clinical variables and pharmacological therapies.

[0223] Unsupervised Data Analysis Comparing Cases vs. Controls

[0224] Given increased levels of inflammatory markers in the CAD patients, we studied the feasibility of using that information to accurately cluster patients with unsupervised analysis. Two-dimensional hierarchical clustering indicated that CAD patients and control patients tended to form large homogeneous clusters, although individual cases and controls remained outside these large clusters (FIG. 7). In terms of measured variables, clinical parameters grouped together while chemokines formed a separate cluster. It is interesting to note that CRP levels correlated better to metabolic parameters rather than chemokine levels.

[0225] Employing principal component analysis, it was found that 60-70% of the variability observed within the subjects could be explained by chemokines, insulin resistance profile, and a subset of other clinical variables such as hypertension and hyperlipidemia, with markers of inflammation being the dominant factor (FIG. 8).

[0226] Classification of Case and Control Status Employing Chemokine Profile and Clinical Variables

[0227] To determine the optimal minimal set of variables that can accurately distinguish between case and control subjects, we utilized the SVM classification algorithm (Tabibiazar 2005 Physiol Genomics. 2005 Jul. 14; 22(2):213-26). SVM identified a set of 15 variables able to stratify subjects with a high degree of accuracy (misclassification rate of <10%) (FIG. 9). In addition to known risk factors for CAD, measurement of circulating chemokines significantly improved the prediction of disease. To validate our findings we employed several other classification algorithms, which yielded similarly high levels of sensitivity and specificity for prediction of CAD: LR (80% sensitivity, 88% specificity), LDA (73%, 94%), and CART (80%, 88%).

[0228] Inflammatory Marker Measurements Improve on Classification by Clinical Variables Alone

[0229] The classification ability of a single versus multiple variables to distinguish case and control subjects was further evaluated using ROC curves. Among the chemokines, MCP-4 appeared to be the most sensitive and MCP-1 the most specific, both showing a good accuracy (AUC 0.896 and 0.849 respectively) (FIG. 10A). It is noticeable that CRP did not appear to be helpful in the identification of disease outside an epidemiologic context, whereas specific markers of vascular inflammation were more accurate. FIG. 11 shows the results of three logistic regression analyses, in which chemokines were entered either by a stepwise selection (models 1 and 2) or as combined score (model 3). Out of three models, two have an overall accuracy in CAD patients over 90%, supporting the hypothesis that the use of multiple markers to distinguish ASCVD patients will be highly informative. Further demonstration is provided by the classification performance of the LR models compared to that of the best chemokines, MCP-1 and -4 (FIG. 10B). It is clear that the use of a multi-marker algorithm provides a better estimate of the presence of disease.

[0230] Discussion

[0231] There is an obvious need for improved tools to diagnose and treat pre-clinical ASCVD. At present, although insights into mechanisms and circumstances of atherosclerosis are increasing, our methods for identifying high-risk patients and predicting the efficacy of prevention strategies remain inadequate. A growing body of evidence has implicated vascular inflammation as the primary pathophysiological process in every stage of atherogenesis⁵ and several studies have investigated the diagnostic potential of inflammatory markers¹⁷.

[0232] Currently, while general markers of inflammation are potentially useful in risk stratification, they are not adequate to identify the presence of CAD in the general population¹⁸. The lack of specificity of these markers may stem from the fact that they are not derived from the vasculature and may signal inflammation in any organ. It is also possible that the heterogeneity of the individual response to environmental risk factors induces a high variability in ASCVD marker concentration. In this context, biological information carried by a single inflammatory protein could be insufficient to provide a comprehensive representation of the vascular inflammatory state, and may not be able to accurately identify the presence and extent of the disease. In contrast, a multidimensional approach utilizing profiles of several inflammatory markers may provide a pathognomonic signature of atherosclerosis-related vascular inflammation. The present study provides experimental support to this hypothesis and suggests that utilization of multiple inflammatory markers may effectively identify patients with coronary heart disease.

[0233] Since vascular inflammation is the underlying pathophysiological basis of atherosclerosis, chemokines, which are produced in atherosclerotic vessel, are prime candidates to be markers of CAD. Chemokines are a network of chemotactic proteins produced by white cells and endothelial cells when activated¹⁹. Their main role is accumulation and activation of leukocytes in tissues, and their interaction with several cellular receptors contributes to the specificity of the inflammatory infiltrate^{20,21}. Chemokines are often present as groups with varying composition, and the biological effect of such groups can be quite different from that of individual factors in isolation, so measuring global patterns of cytokine and chemokine expression is more likely to yield biologically relevant information than individual protein assays.

[0234] Our data clearly demonstrate that plasma concentrations of several chemokines are differentially regulated in individuals with clinical CAD compared with healthy controls subjects, even after adjusting for known clinical variables. As such, multivariate models combining these markers accurately distinguished samples between the two groups. As hypothesized, prediction models using multiple analytes were much more accurate than those using single inflammatory proteins. These results were validated by several multivariate statistical analyses performed with distinct algorithms yielding remarkably consistent results.

[0235] The consistency of each model, as well as the reproducibility of results with different tests, suggests that the chemokine profile represents a strong signal of vascular disease. These results are highly significant despite the relatively small size of the cohort, and the fact that patients were on maximal therapy.

[0236] In our data, despite a clear distinction in vascular and metabolic phenotypes, no significant difference in CRP levels was noted between cases and controls. This may be explained by the relatively small sample size as well as the greater use of pharmacological therapies proven to reduce CRP levels, such as statins and aspirin, in the CAD group. However, individuals with previous myocardial infarction remain at higher risk of coronary events than subjects without history of CAD²² despite treatment. Moreover, the major role advocated for CRP in clinical practice is to more accurately stratify individuals when classical risk factors are not definitive, although the issue is still controversial²³. Whereas a decrease in CRP levels during treatment could be used as an index of response to therapy^{8 9}, in our cross-sectional study design, CRP was no more informative than other clinical variables.

[0237] There are some limitations to our study. The serum samples from the case subjects were collected post acute event (range 7 weeks to 20 weeks, median 3.4 months). Although inflammatory markers generally tend to return to their baseline levels within 4-8 weeks, we cannot rule out that the acute event can lead to changes in levels of inflammatory markers. Also, our study design does not establish a prognostic value for the proteomic profiles used to distinguish between case and control subjects, although the proteomic profile identified in our study may indeed have a prognostic value for prediction of primary or secondary events. Obviously, our panel of biomarkers is not a comprehensive list. Indeed, the use of a wider array of analytes may improve sensitivity and specificity for diagnosing ASCVD. However, this initial study demonstrates the feasibility of using protein microarrays to simultaneously monitor multiple biomarkers.

[0238] In summary, we have identified a panel of circulating serum inflammatory markers whose unique signature patterns can accurately distinguish patients with CAD and controls. A large-scale study validating this approach is reported in Example 5, below.

### REFERENCES

[0239] 1. NHLBI morbidity and mortality chartbook, 2002. Bethesda, Md.: National Heart, Lung, and Blood Institute, May 2002.; 2002.
[0240] 2. NHLBI fact book, fiscal year 2003. Bethesda, Md.: National Heart, Lung, and Blood Institute, February 2004.; 2003:35-53.
[0241] 3. Kannel W B, Schatzkin A. Sudden death: lessons from subsets in population studies. J Am Coll Cardiol. June 1985; 5(6 Suppl):141B-149B.
[0242] 4. Kannel W B, McGee D L. Epidemiology of sudden death: insights from the Framingham Study. Cardiovasc Clin. 1985; 15(3):93-105.
[0243] 5. Ross R. Atherosclerosis—an inflammatory disease. N Engl J. Med. Jan. 14 1999; 340(2):115-126.
[0244] 6. Glass C K, Witztum J L. Atherosclerosis. the road ahead. Cell. Feb. 23 2001; 104(4):503-516.
[0245] 7. Libby P. Inflammation in atherosclerosis. Nature. Dec. 19-26 2002; 420(6917):868-874.
[0246] 8. Rifai N, Ridker P M. Inflammatory markers and coronary heart disease. Curr Opin Lipidol. August 2002; 13(4):383-389.
[0247] 9. Ridker P M, Cannon C P, Morrow D, et al. C-reactive protein levels and outcomes after statin therapy. N Engl J Med. Jan. 6 2005; 352(1):20-28.
[0248] 10. See manufacturer's information (Whatman; Schleicher & Schuell).
[0249] 11. See manufacturer's information (Whatman; Schleicher & Schuell).
[0250] 12. Zweig M H, Campbell G. Receiver-operating characteristic (ROC) plots: a fundamental evaluation tool in clinical medicine. Clin Chem. April 1993; 39(4):561-577.
[0251] 13. Saeed A I, Sharov V, White J, et al. TM4: a free, open-source system for microarray data management and analysis. Biotechniques. February 2003; 34(2):374-378.
[0252] 14. Burges C J C. A tutorial on support vector machines for pattern recognition. Data Mining and Knowledge Discovery. 1998; 2(2):121-167.
[0253] 15. Guyon I, Weston J, Barnhill S, et al. Gene selection for cancer classification using support vector machines. Machine Learning. 2002; 46(1/3):389.
[0254] 16. Ramaswamy S, Tamayo P, Rifkin R, et al. Multiclass cancer diagnosis using tumor gene expression signatures. Proc Natl Acad Sci USA. Dec. 18 2001; 98(26):15149-15154.
[0255] 17. Ridker P M, Brown N J, Vaughan D E, et al. Established and emerging plasma biomarkers in the prediction of first atherothrombotic events. Circulation. Jun. 29 2004; 109(25 Suppl 1):IV6-19.
[0256] 18. Pearson T A, Mensah G A, Alexander R W, et al. Markers of inflammation and cardiovascular disease: application to clinical and public health practice: A statement for healthcare professionals from the Centers for Disease Control and Prevention and the American Heart Association. Circulation. Jan. 28 2003; 107(3):499-511
[0257] 19. Charo I F, Taubman M B. Chemokines in the pathogenesis of vascular disease. Circ Res. Oct. 29 2004; 95(9):858-866.
[0258] 20. Sallusto F, Mackay C R, Lanzavecchia A. Selective expression of the eotaxin receptor CCR3 by human T helper 2 cells. Science. Sep. 26 1997; 277(5334):2005-2007.
[0259] 21. Luster A D. Chemokines—chemotactic cytokines that mediate inflammation. N Engl J Med. Feb. 12 1998; 338(7):436-445.
[0260] 22. Third Report of the National Cholesterol Education Program (NCEP) Expert Panel on Detection, Evaluation, and Treatment of High Blood Cholesterol in Adults (Adult Treatment Panel III) final report. Circulation. Dec. 17 2002; 106(25):3143-3421.
[0261] 23. Levinson S S. Brief review and critical examination of the use of hs-CRP for cardiac risk assessment with the conclusion that it is premature to use this test. Clin Chim Acta. June 2005; 356(1-2):1-8.
[0262] 24. Tabibiazar R, Wagner R A, Ashley E A, King J Y, Ferrara R, Spin J M, Sanan D A, Narasimhan B, Tibshirani R, Tsao P S, Efron B, Quertermous T. Signature patterns of gene expression in mouse atherosclerosis and their correlation to human coronary disease. Physiol Genomics. 2005 Jul. 14; 22(2):213-26.

### Example 4

### Data Analysis for Inflammatory Markers for Accurate Classification of Coronary Artery Disease

[0263] A study was undertaken with a commercially available Schleicher and Schuell human chemokine chip. We have employed the array for the evaluation of circulating chemokine levels in 100 samples chosen from the Reynolds Center cohorts. The chemokines measured were: MCP-1, MCP-2, MCP-3, MCP-4, eotaxin, IL-8, RANTES, MIP-1alpha and IP-10, although IL8 and RANTES values fell outside the linear range. Genetic loci encoding MCP-1, MCP-2, MCP-3, eotaxin, IL-8, and RANTES have all been extensively investigated by resequencing and genotyping of chosen SNPs in the Reynolds cohorts. Circulating samples were from fifty individuals with history of myocardial infarction and 50 age-matched controls (see cohort descriptions above). Although the controls were not matched on other variables, there was a similar joint distribution for gender and ethnicity and other variables. Arrays were hybridized with manufacture-supplied reagents, washed, and scanned in an Axon scanner, and feature extraction performed with Schleicher & Schuell proprietary software (ArrayVision™ Quant®). Standard curves were generated with reagents included with the array, and concentrations determined for each circulating sample.

[0264] Analyses have taken novel approaches, and have adhered to the basic premise of this proposal, that incorporation of clinical and genotyping data can add information to biomarker data, serving to normalize inter-individual variations of chemokine levels that are not associated with disease status/activity. Analyses were conducted with measurements of chemokine abundance, clinical data, and genotyping information on individual SNPs for the chemokines that had such matching data.

[0265] Discriminating between cases and controls, and finding those variables that serve to discriminate, is the fundamental problem of two-class “classification.” While individual classifiers may do well, votes among them typically do even better. Indeed, methods that involve voting among classifiers are popular, two versions being “bagging” and “boosting.” We have begun analyses with only four classifiers, and simple voting among them on a subject-by-subject basis. The standard approach of cross-validation, in particular 5-fold cross-validation, was used to evaluate prospective performance. Thus, the set of data were partitioned at random into five subsets of nearly equal size. Successively, each procedure (and a vote among the procedures) was developed for the 80%, with results computed for the 20%. The five sets of results were then averaged. More sophisticated sample reuse methods may also find use for assessing prospective accuracy.

[0266] The cited analyses were undertaken for the preliminary sample of 99 subjects. Variables included eotaxin, IP-10, MCP-1, MCP-2, MCP-4, MIP1alpha, GENDER, AGE, GLUCOSE, INSULIN, CRP, and FAT. The variable FAT was determined as the first principal component of BMI and WAIST, and accounted linearly for 91% of the variability in the two latter predictors. There were 51 MI cases and 48 controls. For purposes of estimating a Bayes classification rule for the two-class problem, we used empirical priors; thus they were almost 0.5 per class. Costs of misclassification were taken to be equal. (Of course, for a two-class problem it is only the ratio of products of prior probabilities and misclassification costs that matter. Here the ratio was about one.) Ages ranged from 60 years to 72 years, with the lower end represented more heavily than the upper. The mean was 64.7 years, with respective 25th, 50th, and 75th percentiles 62, 64, 67; the standard deviation of age was 3.1. In the following examples, LDA refers to Fisher's linear discriminant. Methodologies termed CART, FlexTree and LART are described below. With the LART technology, a simple lasso is used first to reduce the number of predictors. For details of how classification was performed see below. One important detail in both FlexTree and LART is a Hotelling T² sort on regression coefficients that is crucial to their predictive power. Weights that devolve from the sort are used in LART's weighted lasso.

TABLE 3
5-fold cross-validated performance.

| | Percent | | |
|---|---|---|---|
| Algorithm | Misclassified | Sensitivity | Specificity |
| Logistic Regression | 16% | 80% | 88% |
| LDA | 17% | 73% | 94% |
| CART | 15% | 80% | 88% |
| LART | 16% | 78% | 90% |
| Vote | 12% | 82% | 90% |

[0267] TABLE 4
Variables identified by the indicated methodology.

| | |
|---|---|
| CART | MCP-4, FAT, eotaxin, MIP1alpha |
| LART | MIP1alpha, MCP-2, MCP-4, eotaxin, AGE, |
| | FAT, Glucose, Insulin |
| Logistic Regression | MIP1alpha, MCP-2, MCP-4, eotaxin |
| LDA | MCP-4, eotaxin, MIP1alpha |

[0268] A further analysis incorporated the cited predictors and also information on available SNP genotypes in the same 99 subjects. Five-fold cross-validated percent misclassified decreased to 10%, while sensitivity increased to 85% and specificity to 92%. In this analysis, the simple lasso approach was used to narrow the numbers of SNPs included. Moreover, CART applied to information available on SNPs within a gene was used to impute any missing SNP values.

[0269] Overall, these analyses provide compelling support for the invention described herein. Despite the small number of analytes and clinical variables evaluated, a reasonable classification result was achieved, by multiple methods. Circulating chemokine measurements were chosen by all of the methods, and there was overlap between the different methods, with MIP1alpha, MCP-4 and eotaxin featuring in multiple algorithms. These analyses suggest that genotyping data may provide additional useful information. High sensitivity CRP, the current benchmark for atherosclerotic disease was not identified as useful in these classification analyses, suggesting that levels of multiple disease related inflammatory markers may provide significant improvement over existing predictors.

[0270] We have summarized the joint distributions of features and of individuals by clustering (unsupervised learning). In our approach to agglomerative, hierarchical clustering (FIG. 6), columns are individuals and rows features. With this algorithm, columns and rows are clustered successively, with the goal of producing sets of features and samples that are “close.” Looking at clustering of variables, it is very informative that the chemokines MCP-2, MIP1-a, MCP-1, IP-10, eotaxin, and MCP-4 all cluster closely together. Also, metabolic variables fasting insulin level, FAT (first principal component of BMI and abdominal girth), and glucose cluster together, as might be expected considering the association of these variables in the context of glucose metabolism and insulin resistance. Gender and age were not found to be close to either of these clusters, and remained separate.

[0271] Interestingly, hsCRP did not cluster with the chemokines, but rather the metabolic variables, arguing that hsCRP levels may not track with vascular inflammation as well as a composite chemokine signature. Sample clusters were not homogeneous with regard to class membership, as might be desired. These analyses argue that unsupervised learning (clustering) is not sufficient for doing supervised learning (classification). Based on results thus far, schemes for classification whereby one tries to form groups based not only on features but also on outcome (that are predictive for classifying subsequent observations on the basis of features alone) seem necessary if one is to do accurate classification.

### Example 5

### Large Clinical Trial of 1330 Patients: Signature Patterns of Circulating Biomarkers for Accurate Prediction and Diagnosis of Atherosclerotic Cardiovascular Diseae and Vascular Inflammation

[0272] Serum Biomarker Data from a Large Clinical Trial for Validation of Multi-Marker Profiles

[0273] Given the encouraging results in the pilot clinical trials, we examined whether multi-marker profiles can be validated in a much larger trial and whether they can serve as highly sensitive and specific markers of atherosclerotic disease in humans. To investigate this approach we utilized a large clinical epidemiological study which included 400 cases of clinically significant ASCVD and 930 control subjects. The study was designed to examine risk factors and other novel determinants of atherosclerosis. Serum samples collected at the time of enrollment were used for simultaneous measurement of multiple inflammatory markers using a protein microarray. Exact methodology used for pilot studies was utilized here (discussed in details in prior examples). Concentrations of a subset of the analytes tested were significantly higher in case subjects. Classification algorithms using the serum expression profile of these markers accurately stratified CAD subjects compared to controls. Moreover, the unique signature pattern of the biomarkers significantly improved the predictive capacity of other known markers of CAD. This larger trial validated our prior finding but also provided with more examples for use of multimarker approach for accurate prediction and diagnosis of atherosclerotic cardiovascular disease and its various clinical sequale.

[0274] Prediction of Atherosclerotic Disease: Selection of Informative Markers

[0275] The selection of a number of informative markers for building classification models requires the definition of a performance metric and a user-defined threshold for producing a model with useful predictive ability based on this metric. In the following section we will define the target quantity to be the “area under the curve” (AUC), the sensitivity and/or specificity of the prediction as well as the overall accuracy of the prediction model.

[0276] Let us now describe one approach for selecting the number of terms for building a predictive model. In this implementation, we will describe the process for selecting markers in the absence of any clinical variables and/or adjusting factors. The process is as follows: We first split randomly our training data into ten groups, each group containing subjects identified as “Healthy” or “Diseased” in proportion to the number of these labels in the complete sample. Each subject was represented by its 24 marker measurements and the label that identifies the state of disease (absent, i.e. “Healthy” of present, i.e. “Diseased”). We chose nine of the groups and for each of the 24 markers: MCP-1, IGF-1, TNFα, IL-5, M-CSF, MCP-2, IP10, MCP-4, IL-3, IFNγ, Ang-2, IL-7, IL-10, Eotaxin, IL-2, IL-4, ICAM-1, IL-6, IL-12p40, MIP1a, IL-5, MCP-3, IL13, IL1b, we trained a model using a given supervised algorithm such as, e.g., Linear Discriminant Analysis, Quadratic Discriminant Analysis, Logistic Regression, etc. on all the data of the 9 groups (i.e. we created a training supergroup). We then applied the model to the tenth group that was excluded from the training procedure and we estimated the testing error “e” and or a number of prediction quality measures described earlier. We repeated the same process 10 times, sampling randomly 9 groups each time for generating a training sample and using the 10^{th} group for estimating the testing error “e” and the prediction quality measures. From the sample of the 10 numbers we then estimated the expected value for each of the prediction quality measures and/or error, as a well the variance of our estimates. Given these values, the marker that improves the average prediction ability of the model as chosen as the first term in the model. We can instead use another measure of improvement instead of the average value of the prediction quality measure, for example we can instead select the term with the highest value of the ratio of the expected quality measure to its variance estimate. Once the first term has been added to the model, we can repeat the process for the remaining markers that did not make it in the current selection step. Thus, in the second step we repeat the aforementioned calculations for the remaining markers. The selection of the second model term can be accomplished by choosing the term that mostly improves our target prediction quality measure or using some combination of the expected value of the current model minus the new model normalized by the errors of those measures.

[0277] FIG. 12 shows the results of applying this process to a set of 1300 subjects. We selected the threshold of AUC>0.75 as our target prediction quality measure and we selected the terms using a Linear Discriminant Analysis model.

[0278] The quality threshold was satisfied using the following marker: MCP-1.

[0279] FIG. 13 shows the results of selecting the terms using a Logistic Regression model while keeping the discovery sample and quality thresholds the same. The comparison with the previous example indicates that the two models have only the first two terms in common (MCP-1, IGF-1) but the third term is different (TNFα vs. M-CSF). Thus we can use a combination of markers and predictive models that will exceed our quality measure threshold.

[0280] In order to show that we can interchange the markers and still satisfy our requirement for a prediction quality measure, we removed the marker MCP-1 from the pool of available markers for selection and repeated the process. FIG. 14 presents the results of this approach using again an LDA model and the same discovery set of 1300 subjects. The new set of two markers that provide a model with AUC>0.75 is composed of: Ang-2, IGF-1.

[0281] As an example of a different selection criterion, we present the results obtained using the AIC criterion within the framework of a Logistic Regression model. This criterion is usually used in the context of selecting the optimum number of terms for a Logistic Regression model. The criterion balances the error increase due to the removal of a term with the reduction of the number of degrees of freedom that this term contributed to the model. Usually, the process of term elimination starts with the full model and terminates when the removal of a term increases the AIC value. The results of term elimination as a function of the AIC criterion are presented in FIG. 15a (the term elimination process is presented past the optimum point). The AUC predictions for a model incorporating increasing number of terms are presented in FIG. 15b. The addition of terms in the aforementioned model is performed in the reverse order of term removal from the complete model, i.e a model including all 24 markers, that the application of the AIC criterion dictates in the term selection process. The latter approach produces a Logistic Regression model with expected AUC>0.75 using at least one marker (MCP-1).

[0282] The process of term selection can be accomplished either with a forward selection (first, second and third examples within this working example) or a backward selection (fourth example within this working example), or a forward/backward selection strategy. This strategy allows for testing of all the terms that have been removed in a previous step in the current reduced model.

[0283] The same selection process can be extended to include both markers and clinical variables. The next two figures, present the results for the case that the candidate variables for a Logistic Regression model include “Hyperlipidemia” (DC912) and “Use of lipid-lowering medication within 160 days before index day” (FIG. 16) or “Statin use,” “ACE blockers use” (FIG. 17) along with all 16 markers. These examples demonstrate that the markers in the set of at least 3 markers required for obtaining an AUC>0.75 can be replaced with clinical variables in the set. The combination of Hyperlipidemia (DC912) and MCP-4 produces a model with expected value of AUC ˜0.85.

[0284] Using the aforementioned methods we can also select the number of markers that will optimize the performance of a model without the use of all the markers. One way to define the optimum number of terms is to choose the number of terms that produce a model with average predictive ability (measured as AUC, or equivalent measures of sensitivity/specificity) that lies no more than one standard error from the maximum value obtained for any combination and number of terms used for the given algorithm. Looking back at FIG. 17, a Logistic Regression model that includes the following markers satisfies these requirements: DC512, DC3005, MCP-4, IGF-1, M-CSF, IL-5, MCP-2, IP-10.

### Example 6

### ACE Inhibitor Response Prediction Models

[0285] Using the methods described in Example 5, we derived models using Logistic Regression or Linear Discriminant Analysis that classify samples according to the use of ACE inhibitors. These models were adjusted for the status of the subject (Control or Case) since the overall level of the markers depends on whether we deal with a healthy individual or not. The models find use in a variety of methods such as, e.g., screening compounds to identify other agents that act as ACE inhibitors or on convergent pathways, and for monitoring the efficacy of ACE inhibitor therapy. In the first example, the compound is provided to a mammalian subject, one or more samples are taken from the subject and datasets are obtained from the sample(s). The datasets are run through an ACE Inhibitor Response Prediction model and the results are used to classify the sample. If the sample is classified as coming from a subject dosed with an ACE inhibitor, then the compound is likely to be a presumptive ACE inhibitor. In the second example, one or more samples are obtained from a subject and datasets from those samples are run through an ACE Inhibitor Response Prediction model. If the sample is classified as coming from a subject dosed with an ACE inhibitor then the therapy is likely to be efficacious. If multiple samplings over time indicate time dependent changes in the value of a predictor obtained from the model, then the therapeutic efficacy of the medication therapy is likely changing, the direction of the change being indicated by a predictor value trending more toward the medication use classification or the no-medication use classification. The protein markers used in the exemplified models are set out in Tables 5 and 6, below, along with the models' performance characteristics.

TABLE 5
ACE Inhibitor Prediction Model 1.
Logistic Regression

| Variables used: | mis-classification | AUC | sensitivity | specificity | accuracy |
|---|---|---|---|---|---|
| MCP-1, IGF-1, TNFa, MCP-2, IP10, IL-5, M- | 0.365 | 0.688 | 0.641 | 0.632 | 0.635 |
| CSF, MCP-4, MCP-3, IL-3, Ang-2, IL- | | | | | |
| 7, Eotaxin | | | | | |

[0286] TABLE 6
ACE Inhibitor Prediction Model 2.
Linear Discriminant Analysis

| Variables used: | mis-classification | AUC | sensitivity | specificity | accuracy |
|---|---|---|---|---|---|
| MCP-1, IGF-1, TNFa, MCP-2, IP10, IL-5, M- | 0.376 | 0.689 | 0.632 | 0.620 | 0.624 |
| CSF, MCP-4, MCP-3, IL-3, Ang-2, IL- | | | | | |
| 7, Eotaxin | | | | | |

### Example 7: ACE Inhibitor or Statin Use Prediction Models

[0287] Using the methods described in Example 5, we derived models using Logistic Regression or Linear Discriminant Analysis that classify samples according to the use of ACE inhibitors or statins. These models were adjusted for the status of the subject (Control or Case) since the overall level of the markers depends on whether we deal with a healthy individual or not. The models find use in a variety of methods such as, e.g., screening compounds to identify other agents that act as ACE inhibitors or statins or on convergent pathways, and for monitoring the efficacy of ACE inhibitor or statin therapy. In the first example, the compound is provided to a mammalian subject, one or more samples are taken from the subject and datasets are obtained from the sample(s). The datasets are run through an ACE Inhibitor or Statin Use Prediction model and the results are used to classify the sample. If the sample is classified as coming from a subject dosed with an ACE inhibitor or statin, then the compound is likely to be a presumptive ACE inhibitor or statin. In the second example, one or more samples are obtained from a subject and datasets from those samples are run through an ACE Inhibitor or Statin Use Prediction model. If the sample is classified as coming from a subject dosed with an ACE inhibitor or statin then the therapy is likely to be efficacious. If multiple samplings over time indicate time dependent changes in the value of a predictor obtained from the model, then the therapeutic efficacy of the medication therapy is likely changing, the direction of the change being indicated by a predictor value trending more toward the medication use classification or the no-medication use classification. The protein markers used in the exemplified models are set out in Tables 7 and 8, below, along with the models' performance characteristics.

### Biomarker Profile for Medication use Responsiveness

[0288] We demonstrate that a panel of markers can be used for monitoring the medication effect on the level of inflammation of a subject. Inspecting the distribution of values for a number of markers (IL-2, IL-5, IL-4) we demonstrate a dosage effect as a function of the number of medications that a control subject is treated with (i.e. no medication vs. one medication vs. two medications). As an example for this approach, we use three medication responsive markers as a panel (IL-2, IL-4 and IL-5). In order to create a single combined score, we create a linear discriminant analysis model where the response variable takes the following levels: “Untreared”, “ACE or Statin”, “ACE and Statin” and we use the first discriminant variate as a surrogate for a combined score. FIG. 18 presents the results from the subjects that are considered “Healthy” (“Controls”) as boxplots for each of the three “treatment” groups. The grey sections of each boxplot extend from the first to the third quantile of the value distribution for each class. The “notches:” around the medians are included for facilitating visual inspection of differences in the level of the median between the classes. The whiskers extend to 1.5 times the interquantile distance. The outliers have not been included in the graph. Clearly the combined score shows a downward trend with increased number of medications. The fact that the notches for the groups are barely overlapping indicates that the differences in the median are rather significant. A panel of biomarkers performs better than any single biomarker alone.

[0289] A similar analysis can be performed by creating a single score from multiple markers using Hottelling's T² method. In this case we can estimate the covariance matrix from the data for the untreated group and calculate the “distance” of each subject based on Hottelling's formula. The later approach can be used not only for creating a “combined distance” from many markers for monitoring medication dosage effect but also for hypothesis testing of the dosage effect. (see Hotelling, H. (1947). Multivariate Quality Control. In C. Eisenhart, M. W. Hastay, and W. A. Wallis, eds. Techniques of Statistical Analysis. New York: McGraw-Hill., herein incorporated by reference).

TABLE 7
ACE Inhibitor or Statin Prediction Model 1.
Logistic Regression

| Variables used: | mis-classification | AUC | sensitivity | specificity | accuracy |
|---|---|---|---|---|---|
| MCP-1, IGF-1, TNFa, MCP-2, IP10, IL- | 0.318 | 0.751 | 0.643 | 0.723 | 0.682 |
| 5, M-CSF, MCP-4, MCP-3, IL-3, Ang-2, | | | | | |
| IL-7, Eotaxin | | | | | |

[0290] TABLE 8
ACE Inhibitor or Statin Prediction Model 2.
Linear Discriminant Analysis

| Variables used: | mis-classification | AUC | sensitivity | specificity | accuracy |
|---|---|---|---|---|---|
| MCP-1, IGF-1, TNFa, MCP-2, IP10, IL-5, M- | 0.320 | 0.754 | 0.686 | 0.673 | 0.680 |
| CSF, MCP-4, MCP-3, IL-3, Ang-2, IL- | | | | | |
| 7, Eotaxin | | | | | |

### Example 8

### Coronary Calcium Score Prediction Models

[0291] Using the methods described in Example 5, we derived models using Logistic Regression or Linear Discriminant Analysis that classify samples according to a predicted coronary calcium score. The protein markers used in the exemplified models are set out in Tables 9 and 10, below, along with the models' performance characteristics.

TABLE 9
Coronary Calcium Score Prediction Model 1.
Logistic Regression

| Variables used: | mis-classification | AUCc | sensitivity | specificity | accuracy |
|---|---|---|---|---|---|
| MCP-1, IGF-1, TNFa, MCP-2, IP10, IL- | 0.470 | 0.536 | 0.567 | 0.500 | 0.530 |
| 5, M-CSF, MCP-4, MCP-3, IL-3, Ang-2, IL- | | | | | |
| 7, Eotaxin | | | | | |

[0292] TABLE 10
Coronary Calcium Score Prediction Model 2.
Linear Discriminant Analysis

| Variables used: | mis-classification | AUC | sensitivity | specificity | accuracy |
|---|---|---|---|---|---|
| MCP-1, IGF-1, TNFa, MCP-2, IP10, IL- | 0.461 | 0.560 | 0.578 | 0.505 | 0.539 |
| 5, M-CSF, MCP-4, MCP-3, IL-3, Ang-2, IL- | | | | | |
| 7, Eotaxin | | | | | |

### Example 9

### Stable vs. Unstable Atherosclerotic Disease Prediction Models

[0293] Using the methods described in Example 5, we derived models using Logistic Regression or Linear Discriminant Analysis that classify samples into stable (i.e., angina) or unstable (i.e., myocardial infarction) categories. The protein markers used in the exemplified models are set out in Tables 11 and 12, below, along with the models' performance characteristics.

TABLE 11
Stable vs. Unstable Disease Prediction Model 1.
Logistic Regression

| Variables used: | mis-classification | AUC | sensitivity | specificity | accuracy |
|---|---|---|---|---|---|
| MCP-1, IGF-1, TNFa, MCP-2, IP10, IL-5, M- | 0.438 | 0.566 | 0.563 | 0.562 | 0.562 |
| CSF, MCP-4, MCP-3, IL-3, Ang-2, IL- | | | | | |
| 7, Eotaxin | | | | | |

[0294] TABLE 12
Stable vs. Unstable Disease Prediction Model 2.
Linear Discriminant Analysis

| | mean | | | speci- | |
|---|---|---|---|---|---|
| Variables used: | cv error | AUC | sensitivity | ficity | accuracy |
| MCP-1, IGF-1, | 0.444 | 0.577 | 0.583 | 0.529 | 0.556 |
| TNFa, MCP-2, IP10, | | | | | |
| IL-5, M-CSF, MCP-4, | | | | | |
| MCP-3, IL-3, Ang-2, | | | | | |
| IL-7, Eotaxin | | | | | |

### Example 10

### Disease vs. Healthy Control Prediction Models

[0295] Using the methods described in Example 5, we derived models using Logistic Regression or Linear Discriminant Analysis that classify samples into disease (i.e., angina or myocardial infarction) or healthy control categories. The protein markers used in the exemplified models are set out in Tables 13 and 14, below, along with the models' performance characteristics. Tables 13 and 14 also indicate how the performance of the models change as combinations of markers are substituted.

TABLE 13
Disease vs. Control Prediction Model 1.
Linear Discriminant Analysis

| Variables used: | mis-classification | AUC | sensitivity | specificity | accuracy |
|---|---|---|---|---|---|
| MCP-1, IGF-1, TNFa, MCP-2, IP10, IL- | 0.158 | 0.915 | 0.847 | 0.840 | 0.842 |
| 5, M-CSF, MCP-4, MCP-3, IL-3, Ang-2, IL- | | | | | |
| 7, Eotaxin | | | | | |
| MCP-1, IGF-1, TNFa | 0.245 | 0.827 | 0.804 | 0.733 | 0.755 |
| MCP-1, IGF-1, M-CSF | 0.235 | 0.825 | 0.786 | 0.756 | 0.765 |
| Ang-2, IGF-1, M-CSF | 0.258 | 0.798 | 0.718 | 0.753 | 0.742 |
| MCP-4, IGF-1, M-CSF | 0.258 | 0.789 | 0.721 | 0.750 | 0.742 |
| MCP-1, IGF-1, TNFa, IL-5 | 0.225 | 0.850 | 0.817 | 0.757 | 0.775 |
| MCP-1, IGF-1, M-CSF, MCP-2 | 0.227 | 0.842 | 0.801 | 0.760 | 0.773 |
| Ang-2, IGF-1, M-CSF, IL-5 | 0.239 | 0.816 | 0.754 | 0.764 | 0.761 |
| MCP-1, IGF-1, TNFa, MCP-2 | 0.240 | 0.842 | 0.792 | 0.746 | 0.760 |
| MCP-1, IGF-1, TNFa, IL-5, M-CSF | 0.213 | 0.867 | 0.837 | 0.765 | 0.787 |
| MCP-1, IGF-1, IP10, MCP-2, M-CSF | 0.184 | 0.874 | 0.807 | 0.821 | 0.816 |
| Ang-2, IGF-1, TNFa, IL-5, M-CSF | 0.216 | 0.855 | 0.807 | 0.774 | 0.784 |
| MCP-1, IGF-1, TNFa, MCP-2, IP10 | 0.203 | 0.878 | 0.784 | 0.802 | 0.797 |
| MCP-4, IGF-1, M-CSF, TNFa, IL-5 | 0.221 | 0.855 | 0.812 | 0.765 | 0.779 |
| MCP-4, IGF-1, M-CSF, MCP-2, IL-5 | 0.246 | 0.807 | 0.736 | 0.761 | 0.754 |

[0296] TABLE 14
Disease vs. Control Prediction Model 2.
Logistic Regression

| Variables used: | mis-classification | AUC | sensitivity | specificity | accuracy |
|---|---|---|---|---|---|
| MCP-1, IGF-1, TNFa, MCP-2, IP10, IL- | 0.153 | 0.916 | 0.859 | 0.841 | 0.847 |
| 5, M-CSF, MCP-4, MCP-3, IL-3, Ang-2, IL- | | | | | |
| 7, Eotaxin | | | | | |
| MCP-1, IGF-1, TNFa | 0.237 | 0.835 | 0.804 | 0.745 | 0.763 |
| MCP-1, IGF-1, M-CSF | 0.239 | 0.831 | 0.789 | 0.749 | 0.761 |
| Ang-2, IGF-1, M-CSF | 0.257 | 0.799 | 0.734 | 0.747 | 0.743 |
| MCP-4, IGF-1, M-CSF | 0.258 | 0.792 | 0.733 | 0.745 | 0.742 |
| MCP-1, IGF-1, TNFa, IL-5 | 0.221 | 0.856 | 0.826 | 0.759 | 0.779 |
| MCP-1, IGF-1, M-CSF, MCP-2 | 0.236 | 0.845 | 0.794 | 0.750 | 0.764 |
| Ang-2, IGF-1, M-CSF, IL-5 | 0.243 | 0.813 | 0.766 | 0.754 | 0.757 |
| MCP-1, IGF-1, TNFa, MCP-2 | 0.235 | 0.849 | 0.784 | 0.757 | 0.765 |
| MCP-1, IGF-1, TNFa, IL-5, M-CSF | 0.212 | 0.868 | 0.832 | 0.769 | 0.788 |
| MCP-1, IGF-1, IP10, MCP-2, M-CSF | 0.187 | 0.876 | 0.804 | 0.816 | 0.813 |
| Ang-2, IGF-1, TNFa, IL-5, M-CSF | 0.220 | 0.855 | 0.801 | 0.771 | 0.780 |
| MCP-1, IGF-1, TNFa, MCP-2, IP10 | 0.202 | 0.881 | 0.794 | 0.799 | 0.798 |
| MCP-4, IGF-1, M-CSF, TNFa, IL-5 | 0.223 | 0.857 | 0.807 | 0.764 | 0.777 |
| MCP-4, IGF-1, M-CSF, MCP-2, IL-5 | 0.258 | 0.810 | 0.734 | 0.746 | 0.742 |

### Example 11

### Classification using an LDA Model

[0297] We classified a patient into a “Control” or “Disease” category based on the values of the following markers MCP-1, IGF-1 and TNFa. The costs of misclassification are taken to be equal for the two classes. Based on an LDA approach, a new subject with values x of the aforementioned markers is categorized into the “Disease” category if the left side of equation (1) is greater than the right side of the equation where:

[0298] a) index 2 corresponds to the “Disease” state

[0299] b) index 1 corresponds to the “Control” state

[0300] c) N is the total size of the training set

[0301] d) N1,N2 are the number of “Control” and “Disease” subjects in the training set

[0302] e) Σ is the covariance matrix as estimated from the training set

[0303] f) μ_{1,2} are the mean vectors of the “Control” and “Disease” sample respectively

$$x \text{?} \text{?} \sum \text{?} > \frac{1}{2} \text{?} \sum \text{?} - \frac{1}{2} \text{?} \sum \text{?} + log ( {N}_{1} / N ) log ( {N}_{2} / N ) \\ \text{?} \text{indicates text missing or illegible when filed} \qquad ( 1 )$$

[0304] In order to build an LDA model for the prediction we used a training set containing the three marker values for 398 subjects that were identified as “Control” and 398 subjects that were identified as “Disease.” The marker values are first log10 transformed and the resulting values are used to estimate the required terms of Eq. 1. The covariance matrix and mean marker vectors for the training set are equal to:

[0305] Covariance matrix:

| | MCP-1 | IGF-1 | TNFa |
|---|---|---|---|
| MCP-1 | 0.124155 | 0.069587 | 0.06659 |
| IGF-1 | 0.069587 | 1.321971 | 0.664374 |
| TNFa | 0.06659 | 0.664374 | 0.565535 |

[0306] Mean marker vectors for “Control” and “Disease” states:

| | | | |
|---|---|---|---|
| Control | 1.891552 | 2.830981 | 0.781913 |
| Disease | 1.223976 | 2.324683 | 0.990313 |

[0307] The inverse of the covariance matrix that is needed in equation 1 is:

| | V1 | V2 | V3 |
|---|---|---|---|
| 1 | 8.607599 | 0.13735 | −1.17487 |
| 2 | 0.13735 | 1.848967 | −2.18828 |
| 3 | −1.17487 | −2.18828 | 4.477304 |

[0308] We classified a subject with the following values (transformed using a log10 transformation):

[0309] Subject 1:

| MCP-1 | IGF-1 | TNFa |
|---|---|---|
| 0.716998 | 1.316101 | 0.287882 |

[0310] Based on these values and Eq. 1, the left side of the equation is equal to: 0.5291794 while the right side of the equation is equal to 3.232524. Based on the fact that the left side is less than the right side, the subject was classified into the “Control” category.

[0311] We classified a second subject with the following log10 transformed marker values:

[0312] Subject 2:

| MCP-1 | IGF-1 | TNFa |
|---|---|---|
| 1.991509 | 1.1113031 | 0.536339 |

[0313] Based on these values and using equation 1, the left side is equal to 4.461167 and the right hand side remains 3.232524. Based on this comparison the subject was classified into the “Disease” category.

[0314] Reference for this and the following example is made to “The elements of Statistical Learning. Data Mining, Inference and Prediction”, Hastie, T., Tibshirani, R., Friedman, J., Springer Series in Statistics, 2001), herein incorporated by reference.

### Example 12

### Classification using a Logistic Regression Model

[0315] We classified a patient into a “Control” or “Disease” category based on the values of the following markers MCP-1, IGF-1 and M-CSF. The costs of misclassification are taken to be equal for the two classes. Based on a Logistic Regression approach, a new subject with values x of the aforementioned markers will be categorized as Disease if the log ratio of the posterior probabilities of class k (=Disease) to class K(=Control) is greater than zero, otherwise it is categorized as Control (Equation 2).

$$log \frac{Pr ( G = k \vert X = x )}{Pr ( G = K \vert X = x )} = {β}_{k 0} + {β}_{k}^{T} x . \qquad ( 2 )$$

[0316] In order to fit a Logistic Regression model we used a training set composed of 398 subjects identified as “Control” and 398 subjects identified as “Disease.” The values of the three markers for each subject were first log10 transformed. The Logistic Regression fit provides the following coefficients:

| b0 | b1 | b2 | b3 |
|---|---|---|---|
| −4.95059 | 3.334 | −1.27675 | 1.279328 |

[0317] A new subject with the following values for the three markers was classified:

| | MCP-1 | IGF-1 | M-CSF |
|---|---|---|---|
| Subject 1 | 1.679931 | 3.493781 | 1.169145 |

[0318] The following calculation b0+b1*‘MCP-1’+b2*‘IGF-1’+b3*‘M-CSF’ equals −2.031. Based on the previous discussion this subject has a linear predictor value less than zero and was classified into the “Control” category.

[0319] Another subject was classified, based on the following values:

| | MCP-1 | IGF-1 | M-CSF |
|---|---|---|---|
| Subject 2 | 2.108252 | 1.7149 | 0.539566 |

[0320] Using the same coefficients and formula the linear predictor equals 0.5799186 and Subject 2 was classified into the “Disease” category.

[0321] Each publication cited in this specification is hereby incorporated by reference in its entirety for all purposes. In addition to those publications listed throughout the body of this specification, the following also is hereby incorporated by reference in its entirety for all purposes: Tabibiazar R, Wagner R A, Deng A, Tsao P S, Quertermous T. Proteomic profiles of serum inflammatory markers accurately predict atherosclerosis in mice. Physiol Genomics. 2006 Apr. 13; 25(2):194-202.

The application's sequence listing, which the Patent Office published only in electronic form, follows.

SEQUENCE LISTING (360 sequences)

SEQ ID NO: 1 - DNA, 760 bp, Homo sapiens
gaggaaccgagaggctgagactaacccagaaacatccaattctcaaactgaagctcgcactctcgcctccagcatgaaagtctctgccgcccttctgtgcctgctgctcatagcagccaccttcattccccaagggctcgctcagccagatgcaatcaatgccccagtcacctgctgttataacttcaccaataggaagatctcagtgcagaggctcgcgagctatagaagaatcaccagcagcaagtgtcccaaagaagctgtgatcttcaagaccattgtggccaaggagatctgtgctgaccccaagcagaagtgggttcaggattccatggaccacctggacaagcaaacccaaactccgaagacttgaacactcactccacaacccaagaatctgcagctaacttattttcccctagctttccccagacaccctgttttattttattataatgaattttgtttgttgatgtgaaacattatgccttaagtaatgttaattcttatttaagttattgatgttttaagtttatctttcatggtactagtgttttttagatacagagacttggggaaattgcttttcctcttgaaccacagttctacccctgggatgttttgagggtctttgcaagaatcattaatacaaagaattttttttaacattccaatgcattgctaaaatattattgtggaaatgaatattttgtaactattacaccaaataaatatatttttgtacaaaaaaaaaaaaaaa

SEQ ID NO: 2 - DNA, 584 bp, Mus musculus
agtgcagagagccagacgggaggaaggccagcccagcaccagcaccagccaactctcactgaagccagctctctcttcctccaccaccatgcaggtccctgtcatgcttctgggcctgctgttcacagttgccggctggagcatccacgtgttggctcagccagatgcagttaacgccccactcacctgctgctactcattcaccagcaagatgatcccaatgagtaggctggagagctacaagaggatcaccagcagcaggtgtcccaaagaagctgtagtttttgtcaccaagctcaagagagaggtctgtgctgaccccaagaaggaatgggtccagacatacattaaaaacctggatcggaaccaaatgagatcagaacctacaactttatttaaaactgcatctgccctaaggtcttcagcacctttgaatgtgaagttgacccgtaaatctgaagctaatgcatccactaccttttccacaaccacctcaagcacttctgtaggagtgaccagtgtgacagtgaactagtgtgactcggactgtgatgccttaattaatattaaacttatttaactta

SEQ ID NO: 3 - protein, 99 aa, Homo sapiens
MKVSAALLCLLLIAATFIPQGLAQPDAINAPVTCCYNFTNRKISVQRLASYRRITSSKCPKEAVIFKTIVAKEICADPKQKWVQDSMDHLDKQTQTPKT

SEQ ID NO: 4 - protein, 99 aa, Homo sapiens; identical to SEQ ID NO: 3

SEQ ID NO: 5 - protein, 25 aa, Homo sapiens
MKVSAALLCLLLIAATFIPQGLAQP

SEQ ID NO: 6 - protein, 148 aa, Mus musculus
MQVPVMLLGLLFTVAGWSIHVLAQPDAVNAPLTCCYSFTSKMIPMSRLESYKRITSSRCPKEAVVFVTKLKREVCADPKKEWVQTYIKNLDRNQMRSEPTTLFKTASALRSSAPLNVKLTRKSEANASTTFSTTTSSTSVGVTSVTVN

SEQ ID NO: 7 - protein, 148 aa, Mus musculus; identical to SEQ ID NO: 6

SEQ ID NO: 8 - protein, 148 aa, Mus musculus; identical to SEQ ID NO: 6

SEQ ID NO: 9 - DNA, 1351 bp, Homo sapiens
gtgatggagagcaccagcaaagccttagggcccatccctggcctcctgttacccacagaggggtaggcccttggctctcttccactatgacgtcagcttccattcttcctttcttatagacaattttccatttcaaggaaatcagagcccttaatagttcagtgaggtcactttgctgagcacaatcccatacccttcagcctctgctccacagagcctaagcaaaagatagaaactcacaacttccttgttttgttatctggaaattatcccaggatctggtgcttactcagcatattcaaggaaggtcttacttcattcttccttgattgtgaccatgcccaggctctctgctccctataaaaggcaggcagagccaccgaggagcagagaggttgagaacaacccagaaaccttcacctctcatgctgaagctcacacccttgccctccaagatgaaggtttctgcagcgcttctgtgcctgctgctcatggcagccactttcagccctcagggacttgctcagccagattcagtttccattccaatcacctgctgctttaacgtgatcaataggaaaattcctatccagaggctggagagctacacaagaatcaccaacatccaatgtcccaaggaagctgtgatcttcaagaccaaacggggcaaggaggtctgtgctgaccccaaggagagatgggtcagggattccatgaagcatctggaccaaatatttcaaaatctgaagccatgagccttcatacatggactgagagtcagagcttgaagaaaagcttatttattttccccaacctcccccaggtgcagtgtgacattattttattataacatccacaaagagattatttttaaataatttaaagcataatatttcttaaaaagtatttaattatatttaagttgttgatgttttaactctatctgtcatacatcctagtgaatgtaaaatgcaaaatcctggtgatgtgttttttgtttttgttttcctgtgagctcaactaagttcacggcaaaatgtcattgttctccctcctacctgtctgtagtgttgtggggtcctcccatggatcatcaaggtgaaacactttggtattctttggcaatcagtgctcctgtaagtcaaatgtgtgctttgtactgctgttgttgaaattgatgttactgtatataactatggaattttgaaaaaaaatttcaaaaagaaaaaaatatatataatttaaaactaaaaaaaaaaaaaaaaaaaaaaaaaaaaaaaaaaaaaaaaaaaaaaaaaaaaaaaaaaaaaaaaaaaaaaaaaaaaaaaaaaaaaaaaaaaaaaaaaaaaaa

SEQ ID NO: 10 - DNA, 516 bp, Mus musculus
gaattcggcacgagggattgagaggacgctagccttcactccaaaatctttgccttcaacatgaagatctacgcagtgcttctttgcctgctgctcatagctgtccctgtcagcccagagaagctgactgggccagataaggctccagtcacctgctgctttcatgtactaaagctgaagatcccccttcgggtgctgaaaagctacgagagaatcaacaatatccagtgccccatggaagctgtggttttccagaccaagcagggtatgtctctctgtgtagaccccacacagaagtgggtcagtgagtacatggagatccttgaccagaagtctcaaattctgcagccttgaaccttcacacctgagttaagagacagccaaagctggaagttctcccctaatcttctccaggcagagagatgttacaagcagatggtgcctgggctgcgtgttttctcatccttgtctgttatatgaacaactgaaataaaagcttacactgatttgcaaatt

SEQ ID NO: 11 - protein, 99 aa, Homo sapiens
MKVSAALLCLLLMAATFSPQGLAQPDSVSIPITCCFNVINRKIPIQRLESYTRITNIQCPKEAVIFKTKRGKEVCADPKERWVRDSMKHLDQIFQNLKP

SEQ ID NO: 12 - protein, 99 aa, Homo sapiens; identical to SEQ ID NO: 11

SEQ ID NO: 13 - protein, 97 aa, Mus musculus
MKIYAVLLCLLLIAVPVSPEKLTGPDKAPVTCCFHVLKLKIPLRVLKSYERINNIQCPMEAVVFQTKQGMSLCVDPTQKWVSEYMEILDQKSQILQP

SEQ ID NO: 14 - protein, 97 aa, Mus musculus; identical to SEQ ID NO: 13

SEQ ID NO: 15 - protein, 97 aa, Mus musculus; identical to SEQ ID NO: 13

SEQ ID NO: 16 - DNA, 810 bp, Homo sapiens
agcagaggggctgagaccaaaccagaaacctccaattctcatgtggaagcccatgccctcaccctccaacatgaaagcctctgcagcacttctgtgtctgctgctcacagcagctgctttcagcccccaggggcttgctcagccagttgggattaatacttcaactacctgctgctacagatttatcaataagaaaatccctaagcagaggctggagagctacagaaggaccaccagtagccactgtccccgggaagctgtaatcttcaagaccaaactggacaaggagatctgtgctgaccccacacagaagtgggtccaggactttatgaagcacctggacaagaaaacccaaactccaaagctttgaacattcatgactgaactaaaaacaagccatgacttgagaaacaaataatttgtataccctgtcctttctcagagtggttctgagattattttaatctaattctaaggaatatgagctttatgtaataatgtgaatcatggtttttcttagtagattttaaaagttattaatattttaatttaatcttccatggattttggtgggttttgaacataaagccttggatgtatatgtcatctcagtgctgtaaaaactgtgggatgctcctcccttctctacctcatgggggtattgtataagtccttgcaagaatcagtgcaaagatttgctttaattgttaagatatgatgtccctatggaagcatattgttattatataattacatatttgcatatgtatgactcccaaattttcacataaaatagatttttgtaaaaaa

SEQ ID NO: 17 - DNA, 911 bp, Mus musculus
agagaagcaaggccagcacagagtctgccagctctcactgaagccagctctctcactctctttctccaccatgaggatctctgccacgcttctgtgcctgctgctcatagccgctgctttcagcatccaagtgtgggcccaaccagatgggcccaatgcatccacatgctgctatgtcaagaaacaaaagatccccaagaggaatctcaagagctacagaaggatcaccagtagtcggtgtccctgggaagctgttatcttcaagacaaagaagggcatggaagtctgtgctgaagcccatcagaagtgggtcgaggaggctatagcatacttagacatgaaaaccccaactccaaagccttgaagaaatgtgcctgaacagaaaccaacctaggagccaagaagcaaaaattcctcaccgctgttctttctgagaactgttgatgaaatgtgttgatcacggtcctaagggataggagctgtctgtaggaatgtgaaacagtcacgcctaaggaatggtctttaagttattaatatttttatttaattagccatgtactttggtgtgatttgaatgtaaagctctggagacctcatgtcactttaacattgtgttagctgcagaattctccccctttccccatttttactttgttcttgtattatgaagggactttgcaagaatcagtgcaaagattttatttaaaaacttttaggataaaatcataatgttatgatactgtgtggtttttaaatgtatgactactgaagtttcatataaaatgtatttttgcacaaaaaaaaaaaaaaaaaaaaaaaaaaaaaaaaaaaaaaaaaaaaaaaaaaaaaaaaaaaaaaaaaaaaaaaaaaaaaaaaaaaaaaaaaaaaaaaaaaaaaaaaaaaaaaaaaaa

SEQ ID NO: 18 - protein, 99 aa, Homo sapiens
MKASAALLCLLLTAAAFSPQGLAQPVGINTSTTCCYRFINKKIPKQRLESYRRTTSSHCPREAVIFKTKLDKEICADPTQKWVQDFMKHLDKKTQTPKL

SEQ ID NO: 19 - protein, 99 aa, Homo sapiens; identical to SEQ ID NO: 18

SEQ ID NO: 20 - protein, 99 aa, Homo sapiens; identical to SEQ ID NO: 18

SEQ ID NO: 21 - protein, 109 aa, Homo sapiens
MWKPMPSPSNMKASAALLCLLLTAAAFSPQGLAQPVGINTSTTCCYRFINKKIPKQRLESYRRTTSSHCPREAVIFKTKLDKEICADPTQKWVQDFMKHLDKKTQTPKL

SEQ ID NO: 22 - protein, 97 aa, Mus musculus
MRISATLLCLLLIAAAFSIQVWAQPDGPNASTCCYVKKQKIPKRNLKSYRRITSSRCPWEAVIFKTKKGMEVCAEAHQKWVEEAIAYLDMKTPTPKP

SEQ ID NO: 23 - protein, 97 aa, Mus musculus; identical to SEQ ID NO: 22

SEQ ID NO: 24 - protein, 97 aa, Mus musculus; identical to SEQ ID NO: 22

SEQ ID NO: 25 - DNA, 861 bp, Homo sapiens
aaaaggccggcggaacagccagaggagcagagaggcaaagaaacattgtgaaatctccaactcttaaccttcaacatgaaagtctctgcagtgcttctgtgcctgctgctcatgacagcagctttcaacccccagggacttgctcagccagatgcactcaacgtcccatctacttgctgcttcacatttagcagtaagaagatctccttgcagaggctgaagagctatgtgatcaccaccagcaggtgtccccagaaggctgtcatcttcagaaccaaactgggcaaggagatctgtgctgacccaaaggagaagtgggtccagaattatatgaaacacctgggccggaaagctcacaccctgaagacttgaactctgctacccctactgaaatcaagctggagtacgtgaaatgacttttccattctcctctggcctcctcttctatgctttggaatacttctaccataattttcaaataggatgcattcggttttgtgattcaaaatgtactatgtgttaagtaatattggctattatttgacttgttgctggtttggagtttatttgagtattgctgatcttttctaaagcaaggccttgagcaagtaggttgctgtctctaagcccccttcccttccactatgagctgctggcagtgggtttgtattcggttcccaggggttgagagcatgcctgtgggagtcatggacatgaagggatgctgcaatgtaggaaggagagctctttgtgaatgtgaggtgttgctaaatatgttattgtggaaagatgaatgcaatagtaggactgctgacattttgcagaaaatacattttatttaaaatctcctaaaaaaaaaaa

SEQ ID NO: 26 - DNA, 999 bp, Mus musculus
agaatctctctccaagctgtgaccgacactggcaagatgcaggccctactattccttatggcacttctcttgccttctggggctggagctgaggagattattggtggtgttgagtctagaccacattctcgcccttacatggcccatctggagatcaccactgagagagggttcacagctacctgtggtgggtttctcataacccgccaatttgtgatgactgctgcacactgtagtggaagagaaatcactgtcacccttggagctcatgatgtgagcaagacagaatccacacagcagaagataaaagtagaaaaacaaatcgttcacccaaagtacaacttctattccaatctccatgacatcatgttactgaagcttcaaaagaaagccaaagagactccctctgtgaatgtaattcctctgcctcgtccttctgactttatcaagccggggaagatgtgccgggcagctggctgggggcgaactggagtgacagaacctacctcagatacactgagggaggtgaaactgagaatcatggataaagaggcctgtaaaaactattggcattatgactataacctccaggtctgcgtgggcagtcccagaaagaaaagatcggcatacaagggagactctggaggacctctactgtgtgctggggtggcccacggtattgtatcttatggacgcggagatgcaaagccccctgcagtcttcacccgaatctcctcatatgtgccctggattaacagagtcataaagggcgagtagtgaaaagcctgacctgcgtgcaatcagagtcttcaagccagagctcttctaataacccttgggttcaacaaagcatgtgtccatcctgtcccctgcctgcccccagcctgtccccagcctgtccccagcctgcccccagcctgcccccaagatgatctgaaagatgaattctgtgatgatggactgttccctgtaatgcacctcagtaaagacctaacctcc

SEQ ID NO: 27 - protein, 98 aa, Homo sapiens
MKVSAVLLCLLLMTAAFNPQGLAQPDALNVPSTCCFTFSSKKISLQRLKSYVITTSRCPQKAVIFRTKLGKEICADPKEKWVQNYMKHLGRKAHTLKT

SEQ ID NO: 28 - protein, 246 aa, Mus musculus
MQALLFLMALLLPSGAGAEEIIGGVESRPHSRPYMAHLEITTERGFTATCGGFLITRQFVMTAAHCSGREITVTLGAHDVSKTESTQQKIKVEKQIVHPKYNFYSNLHDIMLLKLQKKAKETPSVNVIPLPRPSDFIKPGKMCRAAGWGRTGVTEPTSDTLREVKLRIMDKEACKNYWHYDYNLQVCVGSPRKKRSAYKGDSGGPLLCAGVAHGIVSYGRGDAKPPAVFTRISSYVPWINRVIKGE

SEQ ID NO: 29 - DNA, 925 bp, Homo sapiens
atgggcaaaggcttccctggaatctcccacactgtctgctccctataaaaggcaggcagatgggccagaggagcagagaggctgagaccaacccagaaaccaccacctctcacgccaaagctcacaccttcagcctccaacatgaaggtctccgcagcacttctgtggctgctgctcatagcagctgccttcagcccccaggggctcgctgggccagcttctgtcccaaccacctgctgctttaacctggccaataggaagataccccttcagcgactagagagctacaggagaatcaccagtggcaaatgtccccagaaagctgtgatcttcaagaccaaactggccaaggatatctgtgccgaccccaagaagaagtgggtgcaggattccatgaagtatctggaccaaaaatctccaactccaaagccataaataatcaccatttttgaaaccaaaccagagcctgagtgttgcctaatttgttttcccttcttacaatgcattctgaggtaacctcattatcagtccaaagggcatgggttttattatatatatatatttttttttttaaaaaaaaaacgtattgcatttaatttattgaggctttaaaacttatcctccatgaatatcagttatttttaaactgtaaagctttgtgcagattctttaccccctgggagccccaattcgatcccctgtcacgtgtgggcaatgttccccctctcctctcttcctccctggaatcttgtaaaggtcctggcaaagatgatcagtatgaaaatgtcattgttcttgtgaacccaaagtgtgactcattaaatggaagtaaatgttgttttaggaatacataaagtatgtgcatattttattatagtcactagttgtaatttttttgtgggaaatccacactgagctgaggggg

SEQ ID NO: 30 - DNA, 982 bp, Mus musculus
tgagaggctgagatccaagcagtaacttccatctgtctccctccaccatgcagagctccacagcgcttctattcctgctgctcacggtcacttccttcacctcccaggtgctggctcacccaggctccatcccaacttcctgctgctttatcatgaccagtaagaagatccccaacacactactgaagagctacaaaagaatcaccaacaacagatgcaccctgaaagccatagtcttcaagaccaggttgggcaaagagatctgtgctgaccccaagaagaagtgggtccaggatgccacaaagcacctggaccaaaaactccaaactccaaaaccataaacaacctcctctcttgacactaacccagagcctaagaactgcttgattccttctctttcctaagacgtgctctgagggaatatcagcaccagtcgcccaaggacttggcttcatgtagttccagatgggactggaagtcattatgtttgctgaaataagtcagactcaaaagattgtgtaatttcttgcatatgcaacatcttaaaaggggggcatgaaaggagatgtgggattattgaggaacacaatgggacgagttaggagtaactgaggataatagcagcttatacacatatatgaaaatgtctattgttttgcacgaattaatatacactaattaaaattaatttacactaactaaaatgttaatatttaaagacatgttacatttaagaaattggagttttaaagcataatttaatgatatcagtcctttttgttattgtgttgtttgtttgcttgcttgtttgaaacagggactcactgtatcaccctgactgacctgtaactcactgtgtagaccaggctgacctcaaactcacagaaatttacctgcctctgcctttaagtgctaccatgccaagccagaatgttttttattagatataccaatatatataataaaatattttactacaaaa

SEQ ID NO: 31 - protein, 97 aa, Homo sapiens
MKVSAALLWLLLIAAAFSPQGLAGPASVPTTCCFNLANRKIPLQRLESYRRITSGKCPQKAVIFKTKLAKDICADPKKKWVQDSMKYLDQKSPTPKP

SEQ ID NO: 32 - protein, 97 aa, Homo sapiens; identical to SEQ ID NO: 31

SEQ ID NO: 33 - protein, 97 aa, Homo sapiens; identical to SEQ ID NO: 31

SEQ ID NO: 34 - protein, 97 aa, Mus musculus
MQSSTALLFLLLTVTSFTSQVLAHPGSIPTSCCFIMTSKKIPNTLLKSYKRITNNRCTLKAIVFKTRLGKEICADPKKKWVQDATKHLDQKLQTPKP

SEQ ID NO: 35 - protein, 97 aa, Mus musculus; identical to SEQ ID NO: 34

SEQ ID NO: 36 - protein, 97 aa, Mus musculus; identical to SEQ ID NO: 34

SEQ ID NO: 37 - DNA, 1172 bp, Homo sapiens
gagacattcctcaattgcttagacatattctgagcctacagcagaggaacctccagtctcagcaccatgaatcaaactgcgattctgatttgctgccttatctttctgactctaagtggcattcaaggagtacctctctctagaaccgtacgctgtacctgcatcagcattagtaatcaacctgttaatccaaggtctttagaaaaacttgaaattattcctgcaagccaattttgtccacgtgttgagatcattgctacaatgaaaaagaagggtgagaagagatgtctgaatccagaatcgaaggccatcaagaatttactgaaagcagttagcaaggaaatgtctaaaagatctccttaaaaccagaggggagcaaaatcgatgcagtgcttccaaggatggaccacacagaggctgcctctcccatcacttccctacatggagtatatgtcaagccataattgttcttagtttgcagttacactaaaaggtgaccaatgatggtcaccaaatcagctgctactactcctgtaggaaggttaatgttcatcatcctaagctattcagtaataactctaccctggcactataatgtaagctctactgaggtgctatgttcttagtggatgttctgaccctgcttcaaatatttccctcacctttcccatcttccaagggtactaaggaatctttctgctttggggtttatcagaattctcagaatctcaaataactaaaaggtatgcaatcaaatctgctttttaaagaatgctctttacttcatggacttccactgccatcctcccaaggggcccaaattctttcagtggctacctacatacaattccaaacacatacaggaaggtagaaatatctgaaaatgtatgtgtaagtattcttatttaatgaaagactgtacaaagtataagtcttagatgtatatatttcctatattgttttcagtgtacatggaataacatgtaattaagtactatgtatcaatgagtaacaggaaaattttaaaaatacagatagatatatgctctgcatgttacataagataaatgtgctgaatggttttcaaataaaaatgaggtactctcctggaaatattaagaaagactatctaaatgttgaaagatcaaaaggttaataaagtaattataact

SEQ ID NO: 38 - DNA, 1063 bp, Mus musculus
catcccgagccaaccttccggaagcctccccatcagcaccatgaacccaagtgctgccgtcattttctgcctcatcctgctgggtctgagtgggactcaagggatccctctcgcaaggacggtccgctgcaactgcatccatatcgatgacgggccagtgagaatgagggccatagggaagcttgaaatcatccctgcgagcctatcctgcccacgtgttgagatcattgccacgatgaaaaagaatgatgagcagagatgtctgaatccggaatctaagaccatcaagaatttaatgaaagcgtttagccaaaaaaggtctaaaagggctccttaactggagtgaagccacgcacacaccccggtgctgcgatggatggacagcagagagcctctctccatcactcccctttacccagtggatggctagtcctaattgcccttggtcttctgaaaggtgaccagccgtggtcacatcagctgctactcctcctgcaggatgatggtcaagccatggtcctgagacaaaagtaactgccgaagcaagaattctttaagggctggtctgagtcctcgctcaagtggctgggatggctgtcctagctctgtactgtaagctatgtggaggtgcgacgcccttcaccatgtgccatgcccaggctgctccccacaccctccttgtcctccctagctcaggctcgtcagttctaagtttacctgagctcttttatttcagatgtaagactacaaatttaagtttgtaagcacgaacttaaccaccatcttcccaaggggttatcaagatactcagaggaacctgaaaatgtatgtgtaaatactatttaatgaacgactgtacaaagtagaattcctaatgtattttttgtatgctttgcattgtatatggaagaacttgtgtcatcaagtatgtatcaatgggtagttaaagtttatttttaaaaccgtccaataccttttgtattatgtaacattcaaaagacaatgtactgtattgaaagtagtaagagacccaaaatgtaataaagtaataataactgacatg

SEQ ID NO: 39 - protein, 98 aa, Homo sapiens
MNQTAILICCLIFLTLSGIQGVPLSRTVRCTCISISNQPVNPRSLEKLEIIPASQFCPRVEIIATMKKKGEKRCLNPESKAIKNLLKAVSKEMSKRSP

SEQ ID NO: 40 - protein, 98 aa, Homo sapiens
MNQTAILICCLIFLTLSGIQGVPLSRTVRCTCISISNQPVNPRSLEKLEIIPASQFCPRVEIIATMKKKGEKRCLNPESKAIKNLLKAVSKERSKRSP

SEQ ID NO: 41 - protein, 98 aa, Mus musculus
MNPSAAVIFCLILLGLSGTQGIPLARTVRCNCIHIDDGPVRMRAIGKLEIIPASLSCPRVEIIATMKKNDEQRCLNPESKTIKNLMKAFSQKRSKRAP

SEQ ID NO: 42 - protein, 98 aa, Mus musculus; identical to SEQ ID NO: 41

SEQ ID NO: 43 - protein, 98 aa, Mus musculus; identical to SEQ ID NO: 41

SEQ ID NO: 44 - DNA, 2749 bp, Homo sapiens
gagggctggccagtgaggctcggcccggggaaagtgaaagtttgcctgggtcctctcggcgccagagccgctctccgcatcccaggacagcggtgcggccctcggccggggcgcccactccgcagcagccagcgagcgagcgagcgagcgagggcggccgacgcgcccggccgggacccagctgcccgtatgaccgcgccgggcgccgccgggcgctgccctcccacgacatggctgggctccctgctgttgttggtctgtctcctggcgagcaggagtatcaccgaggaggtgtcggagtactgtagccacatgattgggagtggacacctgcagtctctgcagcggctgattgacagtcagatggagacctcgtgccaaattacatttgagtttgtagaccaggaacagttgaaagatccagtgtgctaccttaagaaggcatttctcctggtacaagacataatggaggacaccatgcgcttcagagataacacccccaatgccatcgccattgtgcagctgcaggaactctctttgaggctgaagagctgcttcaccaaggattatgaagagcatgacaaggcctgcgtccgaactttctatgagacacctctccagttgctggagaaggtcaagaatgtctttaatgaaacaaagaatctccttgacaaggactggaatattttcagcaagaactgcaacaacagctttgctgaatgctccagccaagatgtggtgaccaagcctgattgcaactgcctgtaccccaaagccatccctagcagtgacccggcctctgtctcccctcatcagcccctcgccccctccatggcccctgtggctggcttgacctgggaggactctgagggaactgagggcagctccctcttgcctggtgagcagcccctgcacacagtggatccaggcagtgccaagcagcggccacccaggagcacctgccagagctttgagccgccagagaccccagttgtcaaggacagcaccatcggtggctcaccacagcctcgcccctctgtcggggccttcaaccccgggatggaggatattcttgactctgcaatgggcactaattgggtcccagaagaagcctctggagaggccagtgagattcccgtaccccaagggacagagctttccccctccaggccaggagggggcagcatgcagacagagcccgccagacccagcaacttcctctcagcatcttctccactccctgcatcagcaaagggccaacagccggcagatgtaactggtacagccttgcccagggtgggccccgtgaggcccactggccaggactggaatcacaccccccagaagacagaccatccatctgccctgctcagagaccccccggagccaggctctcccaggatctcatcactgcgcccccagggcctcagcaacccctccaccctctctgctcagccacagctttccagaagccactcctcgggcagcgtgctgccccttggggagctggagggcaggaggagcaccagggatcggaggagccccgcagagccagaaggaggaccagcaagtgaaggggcagccaggcccctgccccgttttaactccgttcctttgactgacacaggccatgagaggcagtccgagggatcctccagcccgcagctccaggagtctgtcttccacctgctggtgcccagtgtcatcctggtcttgctggccgtcggaggcctcttgttctacaggtggaggcggcggagccatcaagagcctcagagagcggattctcccttggagcaaccagagggcagccccctgactcaggatgacagacaggtggaactgccagtgtagagggaattctaagctggacgcacagaacagtctctccgtgggaggagacattatggggcgtccaccaccacccctccctggccatcctcctggaatgtggtctgccctccaccagagctcctgcctgccaggactggaccagagcagccaggctggggcccctctgtctcaacccgcagacccttgactgaatgagagaggccagaggatgctccccatgctgccactatttattgtgagccctggaggctcccatgtgcttgaggaaggctggtgagcccggctcaggaccctcttccctcaggggctgcaccctcctctcactcccttccatgccggaacccaggccagggacccaccggcctgtggtttgtgggaaagcagggtggacgctgaggagtgaaagaaccctgcacccagagggcctgcctggtgccaaggtatcccagcctggacaggcatggacctgtctccagagagaggagcctgaagttcgtggggcgggacagcgtcggcctgatttcccgtaaaggtgtgcagcctgagagacgggaagaggaggcctctggacctgctggtctgcactgacagcctgaagggtctacaccctcggctcacctaagtgccctgtgctggttgccaggcgcagaggggaggccagccctgccctcaggacctgcctgacctgccagtgatgccaagagggggatcaagcactggcctctgcccctcctccttccagcacctgccagagcttctccaggaggccaagcagaggctcccctcatgaaggaagccattgcactgtgaacactgtacctgcctgctgaacagcctgcccccgtccatccatgagccagcatccgtccgtcctccactctccagcctctcccca

SEQ ID NO: 45 - DNA, 1519 bp, Homo sapiens
gagggctggccagtgaggctcggcccggggaaagtgaaagtttgcctgggtcctctcggcgccagagccgctctccgcatcccaggacagcggtgcggccctcggccggggcgcccactccgcagcagccagcgagcgagcgagcgagcgagggcggccgacgcgcccggccgggacccagctgcccgtatgaccgcgccgggcgccgccgggcgctgccctcccacgacatggctgggctccctgctgttgttggtctgtctcctggcgagcaggagtatcaccgaggaggtgtcggagtactgtagccacatgattgggagtggacacctgcagtctctgcagcggctgattgacagtcagatggagacctcgtgccaaattacatttgagtttgtagaccaggaacagttgaaagatccagtgtgctaccttaagaaggcatttctcctggtacaagacataatggaggacaccatgcgcttcagagataacacccccaatgccatcgccattgtgcagctgcaggaactctctttgaggctgaagagctgcttcaccaaggattatgaagagcatgacaaggcctgcgtccgaactttctatgagacacctctccagttgctggagaaggtcaagaatgtctttaatgaaacaaagaatctccttgacaaggactggaatattttcagcaagaactgcaacaacagctttgctgaatgctccagccaagatgtggtgaccaagcctgattgcaactgcctgtaccccaaagccatccctagcagtgacccggcctctgtctcccctcatcagcccctcgccccctccatggcccctgtggctggcttgacctgggaggactctgagggaactgagggcagctccctcttgcctggtgagcagcccctgcacacagtggatccaggcagtgccaagcagcggccacccaggagcacctgccagagctttgagccgccagagaccccagttgtcaaggacagcaccatcggtggctcaccacagcctcgcccctctgtcggggccttcaaccccgggatggaggatattcttgactctgcaatgggcactaattgggtcccagaagaagcctctggagaggccagtgagattcccgtaccccaagggacagagctttccccctccaggccaggagggggcagcatgcagacagagcccgccagacccagcaacttcctctcagcatcttctccactccctgcatcagcaaagggccaacagccggcagatgtaactggccatgagaggcagtccgagggatcctccagcccgcagctccaggagtctgtcttccacctgctggtgcccagtgtcatcctggtcttgctggccgtcggaggcctcttgttctacaggtggaggcggcggagccatcaagagcctcagagagcggattctcccttggagcaaccagagggcagccccctgactcaggatgacagacaggtggaactgccagtgtagagggaattctaag

SEQ ID NO: 46 - DNA, 1855 bp, Homo sapiens
gagggctggccagtgaggctcggcccggggaaagtgaaagtttgcctgggtcctctcggcgccagagccgctctccgcatcccaggacagcggtgcggccctcggccggggcgcccactccgcagcagccagcgagcgagcgagcgagcgagggcggccgacgcgcccggccgggacccagctgcccgtatgaccgcgccgggcgccgccgggcgctgccctcccacgacatggctgggctccctgctgttgttggtctgtctcctggcgagcaggagtatcaccgaggaggtgtcggagtactgtagccacatgattgggagtggacacctgcagtctctgcagcggctgattgacagtcagatggagacctcgtgccaaattacatttgagtttgtagaccaggaacagttgaaagatccagtgtgctaccttaagaaggcatttctcctggtacaagacataatggaggacaccatgcgcttcagagataacacccccaatgccatcgccattgtgcagctgcaggaactctctttgaggctgaagagctgcttcaccaaggattatgaagagcatgacaaggcctgcgtccgaactttctatgagacacctctccagttgctggagaaggtcaagaatgtctttaatgaaacaaagaatctccttgacaaggactggaatattttcagcaagaactgcaacaacagctttgctgaatgctccagccaaggccatgagaggcagtccgagggatcctccagcccgcagctccaggagtctgtcttccacctgctggtgcccagtgtcatcctggtcttgctggccgtcggaggcctcttgttctacaggtggaggcggcggagccatcaagagcctcagagagcggattctcccttggagcaaccagagggcagccccctgactcaggatgacagacaggtggaactgccagtgtagagggaattctaagctggacgcacagaacagtctctccgtgggaggagacattatggggcgtccaccaccacccctccctggccatcctcctggaatgtggtctgccctccaccagagctcctgcctgccaggactggaccagagcagccaggctggggcccctctgtctcaacccgcagacccttgactgaatgagagaggccagaggatgctccccatgctgccactatttattgtgagccctggaggctcccatgtgcttgaggaaggctggtgagcccggctcaggaccctcttccctcaggggctgcaccctcctctcactcccttccatgccggaacccaggccagggacccaccggcctgtggtttgtgggaaagcagggtggacgctgaggagtgaaagaaccctgcacccagagggcctgcctggtgccaaggtatcccagcctggacaggcatggacctgtctccagagagaggagcctgaagttcgtggggcgggacagcgtcggcctgatttcccgtaaaggtgtgcagcctgagagacgggaagaggaggcctctggacctgctggtctgcactgacagcctgaagggtctacaccctcggctcacctaagtgccctgtgctggttgccaggcgcagaggggaggccagccctgccctcaggacctgcctgacctgccagtgatgccaagagggggatcaagcactggcctctgcccctcctccttccagcacctgccagagcttctccaggaggccaagcagaggctcccctcatgaaggaagccattgcactgtgaacactgtacctgcctgctgaacagcctgcccccgtccatccatgagccagcatccgtccgtcctccactctccagcctctcccca

SEQ ID NO: 47 - DNA, 2545 bp, Homo sapiens
gagggctggccagtgaggctcggcccggggaaagtgaaagtttgcctgggtcctctcggcgccagagccgctctccgcatcccaggacagcggtgcggccctcggccggggcgcccactccgcagcagccagcgagcgagcgagcgagcgagggcggccgacgcgcccggccgggacccagctgcccgtatgaccgcgccgggcgccgccgggcgctgccctcccacgacatggctgggctccctgctgttgttggtctgtctcctggcgagcaggagtatcaccgaggaggtgtcggagtactgtagccacatgattgggagtggacacctgcagtctctgcagcggctgattgacagtcagatggagacctcgtgccaaattacatttgagtttgtagaccaggaacagttgaaagatccagtgtgctaccttaagaaggcatttctcctggtacaagacataatggaggacaccatgcgcttcagagataacacccccaatgccatcgccattgtgcagctgcaggaactctctttgaggctgaagagctgcttcaccaaggattatgaagagcatgacaaggcctgcgtccgaactttctatgagacacctctccagttgctggagaaggtcaagaatgtctttaatgaaacaaagaatctccttgacaaggactggaatattttcagcaagaactgcaacaacagctttgctgaatgctccagccaagatgtggtgaccaagcctgattgcaactgcctgtaccccaaagccatccctagcagtgacccggcctctgtctcccctcatcagcccctcgccccctccatggcccctgtggctggcttgacctgggaggactctgagggaactgagggcagctccctcttgcctggtgagcagcccctgcacacagtggatccaggcagtgccaagcagcggccacccaggagcacctgccagagctttgagccgccagagaccccagttgtcaaggacagcaccatcggtggctcaccacagcctcgcccctctgtcggggccttcaaccccgggatggaggatattcttgactctgcaatgggcactaattgggtcccagaagaagcctctggagaggccagtgagattcccgtaccccaagggacagagctttccccctccaggccaggagggggcagcatgcagacagagcccgccagacccagcaacttcctctcagcatcttctccactccctgcatcagcaaagggccaacagccggcagatgtaactggtacagccttgcccagggtgggccccgtgaggcccactggccaggactggaatcacaccccccagaagacagaccatccatctgccctgctcagagaccccccggagccaggctctcccaggatctcatcactgcgcccccagggcctcagcaacccctccaccctctctgctcagccacagctttccagaagccactcctcgggcagcgtgctgccccttggggagctggagggcaggaggagcaccagggatcggaggagccccgcagagccagaaggaggaccagcaagtgaaggggcagccaggcccctgccccgttttaactccgttcctttgactgacacaggccatgagaggcagtccgagggatcctccagcccgcagctccaggagtctgtcttccacctgctggtgcccagtgtcatcctggtcttgctggccgtcggaggcctcttgttctacaggtggaggcggcggagccatcaagagcctcagagagcggattctcccttggagcaaccagagggcagccccctgactcaggatgacagacaggtggaactgccagtgtagagggaattctaagacccctcaccatcctggacacactcgtttgtcaatgtccctctgaaaatgtgacgcccagccccggacacagtactccagatgttgtctgaccagctcagagagagtacagtgggactgttaccttccttgatatggacagtattcttctatttgtgcagattaagattgcattagtttttttcttaacaactgcatcatactgttgtcatatgttgagcctgtggttctataaaacccctagttccatttcccataaacttctgtcaagccagaccatctctaccctgtacttggacaacttaacttttttaaccaaagtgcagtttatgttcacctttgttaaagccacctttgtggtttctgcccatcacctgaacctactgaagttgtgtgaaatcctaattctgtcatctccgtagccctcccagttgtgcctcctgcacattgatgagtgcctgctgttgtctttgcccatgttgttgatgtagctgtgaccctattgttcctcacccctgccccccgccaaccccagctggcccacctcttccccctcccacccaagcccacagccagcccatcaggaagccttcctggcttctccacaaccttctgactgtcttttcagtcatgccccctgctcttttgtatttggctaatagtatatcaatttgcactt

SEQ ID NO: 48 - DNA, 4169 bp, Mus musculus
gacagagcgacggggaagagagctagcggggacgaccaggcggcccgcttgggggaagggagtcggcggctcagtgggcctctggggtgtagtatgtgtcagtgcctgtgagtgtgtttgtgtgtgtgtatgtctgtgtgtgtctggcggagagccagggtgatttcccataaaccacatgccccgccagcccgcccgcttaaaaggctgtgccgagggctggccagcgaagctcggccaggggaaagtgaaagtttgcctcggtgctctcggtgtcgctgcggctctctgcatcccaggacagcggcgtggccctcgaccggggcgcgggctcttcagccactagcgagcaagggagcgagcgaaccagggcggccaacacgccgtgccgggacccagctgcccgtatgaccgcgcggggcgccgcggggcgctgcccttcttcgacatggctgggctcccggctgctgctggtctgtctcctcatgagcaggagtattgccaaggaggtgtcagaacactgtagccacatgattgggaatggacacctgaaggtcctgcagcagttgatcgacagtcaaatggagacttcatgccagattgcctttgaatttgtagaccaggaacagctggatgatcctgtttgctacctaaagaaggccttttttctggtacaagacataatagatgagaccatgcgctttaaagacaacacccccaatgctaacgccaccgagaggctccaggaactctccaataacctgaacagctgcttcaccaaggactatgaggagcagaacaaggcctgtgtccgaactttccatgagactcctctccagctgctggagaagatcaagaacttctttaatgaaacaaagaatctccttgaaaaggactggaacatttttaccaagaactgcaacaacagctttgctaagtgctctagccgagatgtggtgaccaagcctgattgcaactgcctgtaccctaaagccacccctagcagtgacccggcctctgcctcccctcaccagccccccgccccctccatggcccctctggctggcttggcttgggatgattctcagaggacagagggcagctccctcttgcccagtgagcttccccttcgcatagaggacccaggcagtgccaagcagcgaccacccaggagtacctgccagaccctcgagtcaacagagcaaccaaaccatggggacagactcactgaggactcacaacctcatccttctgcgggggggcccgtccctggggtggaagacattcttgaatcttcactgggcactaactgggtcctagaagaagcttctggagaggctagtgagggatttttgacccaggaagcaaagttttccccctccacgcctgtagggggcagcatccaggcagagactgacagacccagggccctctcagcatctccattccctaaatcaacagaggaccaaaagccagtggatataacagacaggccgttgacagaggtgaaccctatgagacccattggccagacacagaataatactcctgagaagactgatggtacatccacgctgcgtgaagaccaccaggagccaggctctccccatattgcgacaccgaatccccaacgagtcagcaactcagccacccccgttgctcagttactgcttcccaaaagccactcttggggcattgtgctgccccttggggagcttgagggcaagagaagtaccagggatcgaaggagccccgcagagctggaaggaggatcagcaagtgagggggcagccaggcctgtggcccgttttaattccattcctttgactgacacaggccatgtggagcagcatgagggatcctctgacccccagatccctgagtctgtcttccacctgctggtgccgggcatcatcctagtcttgctgactgttgggggcctcctgttctacaagtggaagtggaggagccatcgaaaccctcagacattggattcttctgtggggcgaccagaggacagctccctgacccaggatgaggacagacaggtggaactgccagtatagaaaggattctatgctgggcacacaggactatctctttatggaaggagacatatgggaacatccaccactaccctctcctaccatcttcctgggaatgtggcctaccactaccagagctcctgcctaccaagactggatgaaagaagcagctttgatggggtctttccatcctcacccttagactctcaaccaaagagaaagggctggaggatgccccccacatactgccactatttattgtgggccctggaggctccctgcattggaggaagggcagctcagcagctcaggaccctttcccttaggggctgcttcctcccctcaaaaccagaacctggcaagggactcactagcctggatggcccatgggagaccaggtcagatgagaaggagcagaagagccctgtgcccagaagacccaactggtgccaaggaatcccagcatggacaggcagggacctgtttcccaagaagagagcctgatattcaaagggtgggacagcatctgcccgacttcccgtaaaggcataaaggcacgcagcccaaaagacgggaagaggaggcctttggctgcttgtgttgacagcttaaaggggtctacaccctcaacttgcttaagtgccctctgctgatagccaggaaggagggagaccagccctgcccctcaggacctgacctggctcatgatgccaagaggaagacagagctctagcctcgtcttctcctgcccacagcccctgccagagttcttttgcccagcagaggcacccctcatgaaggaagccattgcactgtgaatactgaacctgcctgctgaacagcctgtcccatccatccctatgagtgaccatccgtccgaatgttctcccacttccttcagcctctcctcggcttcttgcactgagctggcctcacgtgttgactgagggagcccctgagccccaaccttcccctgcctcagcctttgattgtccagggtgaagctgtgggagaaccgcctgggctaccagtcagagctggtctttgggctgtgttccttgcccaggtttctgcatcttgcactttgacattcccaggagggaagtgactagtggaagggagagaggaaggggaggcagagacaaaggccacaggcagagctatgaatgagaatgggtcttgaaaatatgtgtgcacccctaagcttgaaattgatctctatactctagcccctcagccagcctccttcctgttgtctgaaacctggagctaagcaggttgtcctgtcacaagctctggggactgagctccatgctccaaccccaccctcttctgacctttgttctccagacctgacccaggtaggcaagggtaccctcccagtctcacctaccatactgtgccatctctagccaagcaagccaggtttagagaagggtcaaaaaaaaaaaaaaaaaagggttgtttacttccaacttgttctgatgccctctgtttcccaggccaggcttgtctgtggtgacctgggcatgggtgacagggctctcatttgccccttggtctctttatgctgctgagtccccctttcctgccctccctggctactgggtcaataatctttcaggccatgaatctgggaggagagtggtctgtaagctccatcagccctgtcctgagacagcaggggggaaggacactggagactttcttgtggggcttacttagccttctggttacagactatttccatgctagaaaatacatattttaaaatagaaggaaaaacacagaaacaaaacaaaacaaggcattctctacccctccaccttaaacatatattattaaagacagaagagaaaatccaacccattgcaagaagctctttgtgggtgcctggttacatcggagcaggggagcctcaaatccacctttggagccgcccctgtgtgcattaggaacccttctctcctctgagaaagctcagagggagcactgcctcacaaactgtgagactgcgttttttatacttggaagtggtgaattattttatataaggtcatttaaatatctatttaaaaaataggaagctgcttttatatttaataataaaagaagtgcacaagc

SEQ ID NO: 49 - protein, 554 aa, Homo sapiens
MTAPGAAGRCPPTTWLGSLLLLVCLLASRSITEEVSEYCSHMIGSGHLQSLQRLIDSQMETSCQITFEFVDQEQLKDPVCYLKKAFLLVQDIMEDTMRFRDNTPNAIAIVQLQELSLRLKSCFTKDYEEHDKACVRTFYETPLQLLEKVKNVFNETKNLLDKDWNIFSKNCNNSFAECSSQDVVTKPDCNCLYPKAIPSSDPASVSPHQPLAPSMAPVAGLTWEDSEGTEGSSLLPGEQPLHTVDPGSAKQRPPRSTCQSFEPPETPVVKDSTIGGSPQPRPSVGAFNPGMEDILDSAMGTNWVPEEASGEASEIPVPQGTELSPSRPGGGSMQTEPARPSNFLSASSPLPASAKGQQPADVTGTALPRVGPVRPTGQDWNHTPQKTDHPSALLRDPPEPGSPRISSLRPQGLSNPSTLSAQPQLSRSHSSGSVLPLGELEGRRSTRDRRSPAEPEGGPASEGAARPLPRFNSVPLTDTGHERQSEGSSSPQLQESVFHLLVPSVILVLLAVGGLLFYRWRRRSHQEPQRADSPLEQPEGSPLTQDDRQVELPV

SEQ ID NO: 50 - protein, 438 aa, Homo sapiens
MTAPGAAGRCPPTTWLGSLLLLVCLLASRSITEEVSEYCSHMIGSGHLQSLQRLIDSQMETSCQITFEFVDQEQLKDPVCYLKKAFLLVQDIMEDTMRFRDNTPNAIAIVQLQELSLRLKSCFTKDYEEHDKACVRTFYETPLQLLEKVKNVFNETKNLLDKDWNIFSKNCNNSFAECSSQDVVTKPDCNCLYPKAIPSSDPASVSPHQPLAPSMAPVAGLTWEDSEGTEGSSLLPGEQPLHTVDPGSAKQRPPRSTCQSFEPPETPVVKDSTIGGSPQPRPSVGAFNPGMEDILDSAMGTNWVPEEASGEASEIPVPQGTELSPSRPGGGSMQTEPARPSNFLSASSPLPASAKGQQPADVTGHERQSEGSSSPQLQESVFHLLVPSVILVLLAVGGLLFYRWRRRSHQEPQRADSPLEQPEGSPLTQDDRQVELPV

SEQ ID NO: 51 - protein, 256 aa, Homo sapiens
MTAPGAAGRCPPTTWLGSLLLLVCLLASRSITEEVSEYCSHMIGSGHLQSLQRLIDSQMETSCQITFEFVDQEQLKDPVCYLKKAFLLVQDIMEDTMRFRDNTPNAIAIVQLQELSLRLKSCFTKDYEEHDKACVRTFYETPLQLLEKVKNVFNETKNLLDKDWNIFSKNCNNSFAECSSQGHERQSEGSSSPQLQESVFHLLVPSVILVLLAVGGLLFYRWRRRSHQEPQRADSPLEQPEGSPLTQDDRQVELPV

SEQ ID NO: 52 - protein, 554 aa, Homo sapiens; identical to SEQ ID NO: 49

SEQ ID NO: 53 - protein, 554 aa, Homo sapiens; identical to SEQ ID NO: 49

SEQ ID NO: 54 - protein, 243 aa, Homo sapiens
TWLGSLLLLVCLLASRSITEEVSEYCSHMIGSGHLQSLQRLIDSQMETSCQITFEFVDQEQLKDPVCYLKKAFLLVQDIMEDTMRFRDNTPNAIAIVQLQELSLRLKSCFTKDYEEHDKACVRTFYETPLQLLEKVKNVFNETKNLLDKDWNIFSKNCNNSFAECSSQGHERQSEGSFSPQLQESVFHLLVPSVILVLLAVGGLLFYRWRRRSHQEPQRADSPLEQPEGSPLTQDDRQVELPV

SEQ ID NO: 55 - protein, 438 aa, Homo sapiens
MTAPGAAGRCPPTTWLGSLLLLVCLLASRSITEEVSEYCSHMIGSGHLQSLQRLIDSQMETSCQITFEFVDQEQLKDPVCYLKKAFLLVQDIMEDTMRFRDNTPNAIAIVQLQELSLRLKSCFTKDYEEHDKACVRTFYETPLQLLEKVKNVFNETKNLLDKDWNIFSKNCNNSFAECSSQDVVTKPDCNCLYPKAIPSSDPASVSPHQPLAPSMAPVAGLTWEDSEGTEGSSLLPGEQPLHTVDPGSAKQRPPRSTCQSFEPPETPVVKDSTIGGSPQPRPSVGAFNPGMEDILDSAMGTNWVPEEASGEASEIPVPQGTELSPSRPGGGSMQTEPARPSNFLSASSPLPASAKGQQPADVTGHERQSEGSFSPQLQESVFHLLVPSVILVLLAVGGLLFYRWRRRSHQEPQRADSPLEQPEGSPLTQDDRQVELPV

SEQ ID NO: 56 - protein, 554 aa, Homo sapiens
MTAPGAAGRCPPTTWLGSLLLLVCLLASRSITEEVSEYCSHMIGSGHLQSLQRLIDSQMETSCQITFEFVDQEQLKDPVCYLKKAFLLVQDIMEDTMRFRDNTPNAIAIVQLQELSLRLKSCFTKDYEEHDKACVRTFYETPLQLLEKVKNVFNETKNLLDKDWNIFSKNCNNSFAECSSQDVVTKPDCNCLYPKAIPSSDPASVSPHQPLAPSMAPVAGLTWEDSEGTEGSSLLPGEQPLHTVDPGSAKQRPPRSTCQSFEPPETPVVKDSTIGGSPQPRPSVGAFNPGMEDILDSAMGTNWVPEEASGEASEIPVPQGTELSPSRPGGGSMQTEPARPSNFLSASSPLPASAKGQQPADVTGTALPRVGPVRPTGQDWNHTPQKTDHPSALLRDPPEPGSPRISSLRPQGLSNPSTLSAQPQLSRSHSSGSVLPLGELEGRRSTRDRRSPAEPEGGPASEGAARPLPRFNSVPLTDTGHERQSEGSFSPQLQESVFHLLVPSVILVLLAVGGLLFYRWRRRSHQEPQRADSPLEQPEGSPLTQDDRQVELPV

SEQ ID NO: 57 - protein, 552 aa, Mus musculus
MTARGAAGRCPSSTWLGSRLLLVCLLMSRSIAKEVSEHCSHMIGNGHLKVLQQLIDSQMETSCQIAFEFVDQEQLDDPVCYLKKAFFLVQDIIDETMRFKDNTPNANATERLQELSNNLNSCFTKDYEEQNKACVRTFHETPLQLLEKIKNFFNETKNLLEKDWNIFTKNCNNSFAKCSSRDVVTKPDCNCLYPKATPSSDPASASPHQPPAPSMAPLAGLAWDDSQRTEGSSLLPSELPLRIEDPGSAKQRPPRSTCQTLESTEQPNHGDRLTEDSQPHPSAGGPVPGVEDILESSLGTNWVLEEASGEASEGFLTQEAKFSPSTPVGGSIQAETDRPRALSASPFPKSTEDQKPVDITDRPLTEVNPMRPIGQTQNNTPEKTDGTSTLREDHQEPGSPHIATPNPQRVSNSATPVAQLLLPKSHSWGIVLPLGELEGKRSTRDRRSPAELEGGSASEGAARPVARFNSIPLTDTGHVEQHEGSSDPQIPESVFHLLVPGIILVLLTVGGLLFYKWKWRSHRNPQTLDSSVGRPEDSSLTQDEDRQVELPV

SEQ ID NO: 58 - protein, 552 aa, Mus musculus
MTARGAAGRCPSSTWLGSRLLLVCLLMSRSIAKEVSEHCSHMIGNGHLKVLQQLIDSQMETSCQIAFEFVDQEQLDDPVCYLKKAFFLVQDIIDETMRFKDNTPNANATERLQELSNNLNSCFTKDYEEQNKACVRTFHETPLQLLEKIKNFFNETKNLLEKDWNIFTKNCNNSFAKCSSRDVVTKPDCNCLYPKATPSSDPASASPHQPPAPSMAPLAGLAWDDSQRTEGSSLLPSELPLRIEDPGSAKQRPPRSTCQTLESTEQPNHGDRLTEDSQPHPSAGGPVPGVEDILESSLGTNWVLEEASGEASEGFLTQEAKFSPSTPVGGSIQAETDRPRALSASPFPKSTEDQKPVDITDRPLTEVNPMRPIGQTQNNTPEKTDGTSTLREDHQEPGSPHIATPNPQRVSNSATPVAQLLLPKSHSWGIVLPLGELEGKRSTRDRRSPAELEGGSASEGAARPVARFNSIPLTDTGHVEQHEGSSDPQIPESVFHLLVPGIILVLLTVGGLLFYKWKWRSHRDPQTLDSSVGRPEDSSLTQDEDRQVELPV

SEQ ID NO: 59 - DNA, 924 bp, Homo sapiens
cagagccccacgaaggaccagaacaagacagagtgcctcctgccgatccaaacatgagccgcctgcccgtcctgctcctgctccaactcctggtccgccccggactccaagctcccatgacccagacaacgcccttgaagacaagctgggttaactgctctaacatgatcgatgaaattataacacacttaaagcagccacctttgcctttgctggacttcaacaacctcaatggggaagaccaagacattctgatggaaaataaccttcgaaggccaaacctggaggcattcaacagggctgtcaagagtttacagaacgcatcagcaattgagagcattcttaaaaatctcctgccatgtctgcccctggccacggccgcacccacgcgacatccaatccatatcaaggacggtgactggaatgaattccggaggaaactgacgttctatctgaaaacccttgagaatgcgcaggctcaacagacgactttgagcctcgcgatcttttgagtccaacgtccagctcgttctctgggccttctcaccacagagcctcgggacatcaaaaacagcagaacttctgaaacctctgggtcatctctcacacattccaggaccagaagcatttcaccttttcctgcggcatcagatgaattgttaattatctaatttctgaaatgtgcagctcccatttggccttgtgcggttgtgttctcatttttatcccattgagactatttatttatgtatgtatgtatttatttatttattgcctggagtgtgaactgtatttattttagcagaggagccatgtcctgctgcttctgcaaaaaactcagagtggggtggggagcatgttcatttgtacctcgagttttaaactggttcctagggatgtgtgagaataaactagactctgaac

SEQ ID NO: 60 - DNA, 629 bp, Mus musculus
aaccccttggaggaccagaacgagacaatggttcttgccagctctaccaccagcatccacaccatgctgctcctgctcctgatgctcttccacctgggactccaagcttcaatcagtggccgggatacccaccgtttaaccagaacgttgaattgcagctctattgtcaaggagattatagggaagctcccagaacctgaactcaaaactgatgatgaaggaccctctctgaggaataagagctttcggagagtaaacctgtccaaattcgtggaaagccaaggagaagtggatcctgaggacagatacgttatcaagtccaatcttcagaaacttaactgttgcctgcctacatctgcgaatgactctgcgctgccaggggtcttcattcgagatctggatgactttcggaagaaactgagattctacatggtccaccttaacgatctggagacagtgctaacctctagaccacctcagcccgcatctggctccgtctctcctaaccgtggaaccgtggaatgttaaaacagcaggcagagcacctaaagtctgaatgttcctcatggcccatggtcaaaaggattttacattcctttatgccatcaaatgtcttatcaatttatcta

SEQ ID NO: 61 - protein, 152 aa, Homo sapiens
MSRLPVLLLLQLLVRPGLQAPMTQTTPLKTSWVNCSNMIDEIITHLKQPPLPLLDFNNLNGEDQDILMENNLRRPNLEAFNRAVKSLQNASAIESILKNLLPCLPLATAAPTRHPIHIKDGDWNEFRRKLTFYLKTLENAQAQQTTLSLAIF

SEQ ID NO: 62 - protein, 152 aa, Homo sapiens; identical to SEQ ID NO: 61

SEQ ID NO: 63 - protein, 152 aa, Homo sapiens
MSRLPVLLLLQLLVRPGLQAPMTQTTSLKTSWVNCSNMIDEIITHLKQPPLPLLDFNNLNGEDQDILMENNLRRPNLEAFNRAVKSLQNASAIESILKNLLPCLPLATAAPTRHPIHIKDGDWNEFRRKLTFYLKTLENAQAQQTTLSLAIF

SEQ ID NO: 64 - protein, 152 aa, Homo sapiens [sequence omitted]

SEQ ID NO: 65 - protein, 152 aa, Homo sapiens [sequence omitted]

SEQ ID NO: 66 - protein, 166 aa, Mus musculus
MVLASSTTSIHTMLLLLLMLFHLGLQASISGRDTHRLTRTLNCSSIVKEIIGKLPEPELKTDDEGPSLRNKSFRRVNLSKFVESQGEVDPEDRYVIKSNLQKLNCCLPTSANDSALPGVFIRDLDDFRKKLRFYMVHLNDLETVLTSRPPQPASGSVSPNRGTVEC

SEQ ID NO: 67 - protein, 166 aa, Mus musculus; identical to SEQ ID NO: 66

SEQ ID NO: 68 - protein, 166 aa, Mus musculus; identical to SEQ ID NO: 66

SEQ ID NO: 69 - DNA, 1669 bp, Homo sapiens
ctccctcagcaaggacagcagaggaccagctaagagggagagaagcaactacagaccccccctgaaaacaaccctcagacgccacatcccctgacaagctgccaggcaggttctcttcctctcacatactgacccacggctccaccctctctcccctggaaaggacaccatgagcactgaaagcatgatccgggacgtggagctggccgaggaggcgctccccaagaagacaggggggccccagggctccaggcggtgcttgttcctcagcctcttctccttcctgatcgtggcaggcgccaccacgctcttctgcctgctgcactttggagtgatcggcccccagagggaagagttccccagggacctctctctaatcagccctctggcccaggcagtcagatcatcttctcgaaccccgagtgacaagcctgtagcccatgttgtagcaaaccctcaagctgaggggcagctccagtggctgaaccgccgggccaatgccctcctggccaatggcgtggagctgagagataaccagctggtggtgccatcagagggcctgtacctcatctactcccaggtcctcttcaagggccaaggctgcccctccacccatgtgctcctcacccacaccatcagccgcatcgccgtctcctaccagaccaaggtcaacctcctctctgccatcaagagcccctgccagagggagaccccagagggggctgaggccaagccctggtatgagcccatctatctgggaggggtcttccagctggagaagggtgaccgactcagcgctgagatcaatcggcccgactatctcgactttgccgagtctgggcaggtctactttgggatcattgccctgtgaggaggacgaacatccaaccttcccaaacgcctcccctgccccaatccctttattaccccctccttcagacaccctcaacctcttctggctcaaaaagagaattgggggcttagggtcggaacccaagcttagaactttaagcaacaagaccaccacttcgaaacctgggattcaggaatgtgtggcctgcacagtgaagtgctggcaaccactaagaattcaaactggggcctccagaactcactggggcctacagctttgatccctgacatctggaatctggagaccagggagcctttggttctggccagaatgctgcaggacttgagaagacctcacctagaaattgacacaagtggaccttaggccttcctctctccagatgtttccagacttccttgagacacggagcccagccctccccatggagccagctccctctatttatgtttgcacttgtgattatttattatttatttattatttatttatttacagatgaatgtatttatttgggagaccggggtatcctgggggacccaatgtaggagctgccttggctcagacatgttttccgtgaaaacggagctgaacaataggctgttcccatgtagccccctggcctctgtgccttcttttgattatgttttttaaaatatttatctgattaagttgtctaaacaatgctgatttggtgaccaactgtcactcattgctgagcctctgctccccaggggagttgtgtctgtaatcgccctactattcagtggcgagaaataaagtttgcttagaaaagaa

SEQ ID NO: 70 - DNA, 1619 bp, Mus musculus
cctcagcgaggacagcaagggactagccaggagggagaacagaaactccagaacatcttggaaatagctcccagaaaagcaagcagccaaccaggcaggttctgtccctttcactcactggcccaaggcgccacatctccctccagaaaagacaccatgagcacagaaagcatgatccgcgacgtggaactggcagaagaggcactcccccaaaagatggggggcttccagaactccaggcggtgcctatgtctcagcctcttctcattcctgcttgtggcaggggccaccacgctcttctgtctactgaacttcggggtgatcggtccccaaagggatgagaagttcccaaatggcctccctctcatcagttctatggcccagaccctcacactcagatcatcttctcaaaattcgagtgacaagcctgtagcccacgtcgtagcaaaccaccaagtggaggagcagctggagtggctgagccagcgcgccaacgccctcctggccaacggcatggatctcaaagacaaccaactagtggtgccagccgatgggttgtaccttgtctactcccaggttctcttcaagggacaaggctgccccgactacgtgctcctcacccacaccgtcagccgatttgctatctcataccaggagaaagtcaacctcctctctgccgtcaagagcccctgccccaaggacacccctgagggggctgagctcaaaccctggtatgagcccatatacctgggaggagtcttccagctggagaagggggaccaactcagcgctgaggtcaatctgcccaagtacttagactttgcggagtccgggcaggtctactttggagtcattgctctgtgaagggaatgggtgttcatccattctctacccagcccccactctgacccctttactctgacccctttattgtctactcctcagagcccccagtctgtgtccttctaacttagaaaggggattatggctcagagtccaactctgtgctcagagctttcaacaactactcagaaacacaagatgctgggacagtgacctggactgtgggcctctcatgcaccaccatcaaggactcaaatgggctttccgaattcactggagcctcgaatgtccattcctgagttctgcaaagggagagtggtcaggttgcctctgtctcagaatgaggctggataagatctcaggccttcctaccttcagacctttccagactcttccctgaggtgcaatgcacagccttcctcacagagccagcccccctctatttatatttgcacttattatttattatttatttattatttatttatttgcttatgaatgtatttatttggaaggccggggtgtcctggaggacccagtgtgggaagctgtcttcagacagacatgttttctgtgaaaacggagctgagctgtccccacctggcctctctaccttgttgcctcctcttttgcttatgtttaaaacaaaatatttatctaacccaattgtcttaataacgctgatttggtgaccaggctgtcgctacatcactgaacctctgctccccacgggagccgtgactgtaattgccctacagtcaattgagagaaataaa

SEQ ID NO: 71 - protein, 233 aa, Homo sapiens
MSTESMIRDVELAEEALPKKTGGPQGSRRCLFLSLFSFLIVAGATTLFCLLHFGVIGPQREEFPRDLSLISPLAQAVRSSSRTPSDKPVAHVVANPQAEGQLQWLNRRANALLANGVELRDNQLVVPSEGLYLIYSQVLFKGQGCPSTHVLLTHTISRIAVSYQTKVNLLSAIKSPCQRETPEGAEAKPWYEPIYLGGVFQLEKGDRLSAEINRPDYLDFAESGQVYFGIIAL

SEQ ID NO: 72 - protein, 233 aa, Homo sapiens; identical to SEQ ID NO: 71

SEQ ID NO: 73 - protein, 18 aa, Homo sapiens
LSLFSFLIVAGATTLFCL

SEQ ID NO: 74 - protein, 233 aa, Homo sapiens; identical to SEQ ID NO: 71

SEQ ID NO: 75 - protein, 15 aa, Homo sapiens
SSSRTPSDKPVAHVV

SEQ ID NO: 76 - protein, 235 aa, Mus musculus
MSTESMIRDVELAEEALPQKMGGFQNSRRCLCLSLFSFLLVAGATTLFCLLNFGVIGPQRDEKFPNGLPLISSMAQTLTLRSSSQNSSDKPVAHVVANHQVEEQLEWLSQRANALLANGMDLKDNQLVVPADGLYLVYSQVLFKGQGCPDYVLLTHTVSRFAISYQEKVNLLSAVKSPCPKDTPEGAELKPWYEPIYLGGVFQLEKGDQLSAEVNLPKYLDFAESGQVYFGVIAL

SEQ ID NO: 77 - protein, 235 aa, Mus musculus; identical to SEQ ID NO: 76

SEQ ID NO: 78 - DNA, 2269 bp, Homo sapiens
tgggttggtgtttatctcctcccagccttgagggagggaacaacactgtaggatctggggagagaggaacaaaggaccgtgaaagctgctctgtaaaagctgacacagccctcccaagtgagcaggactgttcttcccactgcaatctgacagtttactgcatgcctggagagaacacagcagtaaaaaccaggtttgctactggaaaaagaggaaagagaagactttcattgacggacccagccatggcagcgtagcagccctgcgtttcagacggcagcagctcgggactctggacgtgtgtttgccctcaagtttgctaagctgctggtttattactgaagaaagaatgtggcagattgttttctttactctgagctgtgatcttgtcttggccgcagcctataacaactttcggaagagcatggacagcataggaaagaagcaatatcaggtccagcatgggtcctgcagctacactttcctcctgccagagatggacaactgccgctcttcctccagcccctacgtgtccaatgctgtgcagagggacgcgccgctcgaatacgatgactcggtgcagaggctgcaagtgctggagaacatcatggaaaacaacactcagtggctaatgaagcttgagaattatatccaggacaacatgaagaaagaaatggtagagatacagcagaatgcagtacagaaccagacggctgtgatgatagaaatagggacaaacctgttgaaccaaacagctgagcaaacgcggaagttaactgatgtggaagcccaagtattaaatcagaccacgagacttgaacttcagctcttggaacactccctctcgacaaacaaattggaaaaacagattttggaccagaccagtgaaataaacaaattgcaagataagaacagtttcctagaaaagaaggtgctagctatggaagacaagcacatcatccaactacagtcaataaaagaagagaaagatcagctacaggtgttagtatccaagcaaaattccatcattgaagaactagaaaaaaaaatagtgactgccacggtgaataattcagttcttcaaaagcagcaacatgatctcatggagacagttaataacttactgactatgatgtccacatcaaactcagctaaggaccccactgttgctaaagaagaacaaatcagcttcagagactgtgctgaagtattcaaatcaggacacaccacaaatggcatctacacgttaacattccctaattctacagaagagatcaaggcctactgtgacatggaagctggaggaggcgggtggacaattattcagcgacgtgaggatggcagcgttgattttcagaggacttggaaagaatataaagtgggatttggtaacccttcaggagaatattggctgggaaatgagtttgtttcgcaactgactaatcagcaacgctatgtgcttaaaatacaccttaaagactgggaagggaatgaggcttactcattgtatgaacatttctatctctcaagtgaagaactcaattataggattcaccttaaaggacttacagggacagccggcaaaataagcagcatcagccaaccaggaaatgattttagcacaaaggatggagacaacgacaaatgtatttgcaaatgttcacaaatgctaacaggaggctggtggtttgatgcatgtggtccttccaacttgaacggaatgtactatccacagaggcagaacacaaataagttcaacggcattaaatggtactactggaaaggctcaggctattcgctcaaggccacaaccatgatgatccgaccagcagatttctaaacatcccagtccacctgaggaactgtctcgaactattttcaaagacttaagcccagtgcactgaaagtcacggctgcgcactgtgtcctcttccaccacagagggcgtgtgctcggtgctgacgggacccacatgctccagattagagcctgtaaactttatcacttaaacttgcatcacttaacggaccaaagcaagaccctaaacatccataattgtgattagacagaacacctatgcaaagatgaacccgaggctgagaatcagactgacagtttacagacgctgctgtcacaaccaagaatgttatgtgcaagtttatcagtaaataactggaaaacagaacacttatgttatacaatacagatcatcttggaactgcattcttctgagcactgtttatacactgtgtaaatacccatatgtcct

SEQ ID NO: 79 - DNA, 2475 bp, Mus musculus
gatactgacactgtagactcaggggagaaacaaagagtccgtgcagacctctggagtgagcagggctgctccttcctctcaggacagctccgagtgtgccggggagaagagaagagaagagacaggcactgggaaagagcctgctgcgggacggagaaggctctcactgatggacttattcacacggcacagccctgtgccttagacagcagctgagagctcaggacgcaagtttgctgaactcacagtttagaacccaaaaagagagagagaatgtggcagatcattttcctaacttttggctgggatcttgtcttggcctcagcctacagtaactttaggaagagcgtggacagcacaggcagaaggcagtaccaggtccagaacggaccctgcagctacacgttcctgctgccggagaccgacagctgccgatcttcctccagcccctacatgtccaatgccgtgcagagggatgcacccctcgactacgacgactcagtgcaaaggctgcaggtgctggagaacattctagagaacaacacacagtggctgatgaagctggagaattacattcaggacaacatgaagaaggagatggtggagatccaacagaatgtggtgcagaaccagacagctgtgatgatagagattggaaccagcttgctgaaccagacagcagcacaaactcggaaactgactgatgtggaagcccaagtactaaaccagacgacaagactcgagctgcagcttctccaacattctatttctaccaacaaattggaaaagcagattttggatcagaccagtgaaataaacaagctacaaaataagaacagcttcctagaacagaaagttctggacatggagggcaagcacagcgagcagctacagtccatgaaggagcagaaggacgagctccaggtgctggtgtccaagcagagctctgtcattgacgagctggagaagaagctggtgacagccacggtcaacaactcgctccttcagaagcagcagcatgacctaatggagaccgtcaacagcttgctgaccatgatgtcatcacccaactccaagagctcggttgctatccgtaaagaagagcaaaccaccttcagagactgtgcggaaatcttcaagtcaggactcaccaccagtggcatctacacactgaccttccccaactccacagaggagatcaaggcctactgtgacatggacgtgggtggaggagggtggacagtcatccaacaccgagaagatggcagtgtggacttccagaggacgtggaaagaatacaaagagggcttcgggagccctctgggagagtactggctgggcaatgagtttgtctcccagctgaccggtcagcaccgctacgtgcttaagatccagctgaaggactgggaaggcaacgaggcgcattcgctgtatgatcacttctacctcgctggtgaagagtccaactacaggattcaccttacaggactcacggggaccgcgggcaaaataagtagcatcagccaaccaggaagtgattttagcacaaaggattcggacaatgacaaatgcatctgcaagtgttcccagatgctctcaggaggctggtggtttgacgcatgtggtccttccaacttgaatggacagtactacccacaaaaacagaatacaaataagtttaacggtatcaagtggtactactggaaggggtccggctactcgctcaaggccacaaccatgatgatccggccagcagatttctaaatgcctgcctacactaccagaagaacttgctgcatccaaagattaactccaaggcactgagagacaccaatgcatagcagcccctttccacatcaggaagtgctcctgggggtggggagggtctgtgtgtaccagactgaagcgcatcacttaagcctgcaccgctaaccaaccaaaggcactgcagtctggagaaacacttctgggaaggttgtggctgaggatcagaaggacagcgtgcagactctgtcacagggaagaatgttccgtgggagttcagcagtaaataactggaaaacagaacacttagatggtgcagataaatcttgggaccacattcctctaagcacggtttctagagtgaatacattcacagctcggctgtcacaatgacaaggccgtgtcctcgcactgtggcagccagtatccagggatttctaagtggtgggcacaggttatcatctggagaagcacacattcattgttttcctcttgggtgctttacatgttcatttgaaaacaacacatttacctatcttgatggcttagtttttaatggctggctactatttactatatggcaaaaatgcccacatctctggaataaccaccaaataagcgccatgttggtgaatgcggagactgtactattttgttttcttcctggctgttaaatatgaaggtatttttagtaattaaatataagttatt

SEQ ID NO: 80 - protein, 496 aa, Homo sapiens
MWQIVFFTLSCDLVLAAAYNNFRKSMDSIGKKQYQVQHGSCSYTFLLPEMDNCRSSSSPYVSNAVQRDAPLEYDDSVQRLQVLENIMENNTQWLMKLENYIQDNMKKEMVEIQQNAVQNQTAVMIEIGTNLLNQTAEQTRKLTDVEAQVLNQTTRLELQLLEHSLSTNKLEKQILDQTSEINKLQDKNSFLEKKVLAMEDKHIIQLQSIKEEKDQLQVLVSKQNSIIEELEKKIVTATVNNSVLQKQQHDLMETVNNLLTMMSTSNSAKDPTVAKEEQISFRDCAEVFKSGHTTNGIYTLTFPNSTEEIKAYCDMEAGGGGWTIIQRREDGSVDFQRTWKEYKVGFGNPSGEYWLGNEFVSQLTNQQRYVLKIHLKDWEGNEAYSLYEHFYLSSEELNYRIHLKGLTGTAGKISSISQPGNDFSTKDGDNDKCICKCSQMLTGGWWFDACGPSNLNGMYYPQRQNTNKFNGIKWYYWKGSGYSLKATTMMIRPADF

SEQ ID NO: 81 - protein, 496 aa, Homo sapiens; identical to SEQ ID NO: 80

SEQ ID NO: 82 - protein, 96 aa, Homo sapiens
MWQIVFFTLSCDLVLAAAYNNFRKSMDSIGKKQYQVQHGSCSYTFLLPEMDNCRSSSSPYVSNAVQRDAPLEYDDSVQRLQVLENIMENNTQWLMK

SEQ ID NO: 83 - protein, 13 aa, Homo sapiens
MKKEMVEIQQNAV

SEQ ID NO: 84 - protein, 244 aa, Homo sapiens
METVNNLLTMMSTSNSKDPTVAKEEQISFRDCAEVFKSGHTTNGIYTLTFPNSTEEIKAYCDMEAGGGGWTIIQRREDGSVDFQRTWKEYKVGFGNPSGEYWLGNEFVSQLTNQQRYVLKIHLKDWEGNEAYSLYEHFYLSSEELNYRIHLKGLTGTAGKISSISQPGNDFSTKDGDNDKCICKCSQMLTGGWWFDACGPSNLNGMYYPQRQNTNKFNGIKWYYWKGSGYSLKATTMMIRPADF

SEQ ID NO: 85 - protein, 496 aa, Mus musculus
MWQIIFLTFGWDLVLASAYSNFRKSVDSTGRRQYQVQNGPCSYTFLLPETDSCRSSSSPYMSNAVQRDAPLDYDDSVQRLQVLENILENNTQWLMKLENYIQDNMKKEMVEIQQNVVQNQTAVMIEIGTSLLNQTAAQTRKLTDVEAQVLNQTTRLELQLLQHSISTNKLEKQILDQTSEINKLQNKNSFLEQKVLDMEGKHSEQLQSMKEQKDELQVLVSKQSSVIDELEKKLVTATVNNSLLQKQQHDLMETVNSLLTMMSSPNSKSSVAIRKEEQTTFRDCAEIFKSGLTTSGIYTLTFPNSTEEIKAYCDMDVGGGGWTVIQHREDGSVDFQRTWKEYKEGFGSPLGEYWLGNEFVSQLTGQHRYVLKIQLKDWEGNEAHSLYDHFYLAGEESNYRIHLTGLTGTAGKISSISQPGSDFSTKDSDNDKCICKCSQMLSGGWWFDACGPSNLNGQYYPQKQNTNKFNGIKWYYWKGSGYSLKATTMMIRPADF

SEQ ID NO: 86 - protein, 496 aa, Mus musculus; identical to SEQ ID NO: 85

SEQ ID NO: 87 - DNA, 816 bp, Homo sapiens
atgcactttctttgccaaaggcaaacgcagaacgtttcagagccatgaggatgcttctgcatttgagtttgctagctcttggagctgcctacgtgtatgccatccccacagaaattcccacaagtgcattggtgaaagagaccttggcactgctttctactcatcgaactctgctgatagccaatgagactctgaggattcctgttcctgtacataaaaatcaccaactgtgcactgaagaaatctttcagggaataggcacactggagagtcaaactgtgcaagggggtactgtggaaagactattcaaaaacttgtccttaataaagaaatacattgacggccaaaaaaaaaagtgtggagaagaaagacggagagtaaaccaattcctagactacctgcaagagtttcttggtgtaatgaacaccgagtggataatagaaagttgagactaaactggtttgttgcagccaaagattttggaggagaaggacattttactgcagtgagaatgagggccaagaaagagtcaggccttaattttcagtataatttaacttcagagggaaagtaaatatttcaggcatactgacactttgccagaaagcataaaattcttaaaatatatttcagatatcagaatcattgaagtattttcctccaggcaaaattgatatacttttttcttatttaacttaacattctgtaaaatgtctgttaacttaatagtatttatgaaatggttaagaatttggtaaattagtatttatttaatgttatgttgtgttctaataaaacaaaaatagacaactgttc

SEQ ID NO: 88 - DNA, 1534 bp, Mus musculus
cgctcttcctttgctgaaggccagcgctgaagacttcagagtcatgagaaggatgcttctgcacttgagtgttctgactctcagctgtgtctgggccactgccatggagattcccatgagcacagtggtgaaagagaccttgacacagctgtccgctcaccgagctctgttgacaagcaatgagacgatgaggcttcctgtccctactcataaaaatcaccagctatgcattggagaaatctttcaggggctagacatactgaagaatcaaactgtccgtgggggtactgtggaaatgctattccaaaacctgtcattaataaagaaatacattgaccgccaaaaagagaagtgtggcgaggagagacggaggacgaggcagttcctggattacctgcaagagttccttggtgtgatgagtacagagtgggcaatggaaggctgaggctgagctgctccatggtgacaggacttcacaatttaagttaaattgtcaacagatgcaaaaaccccacaaaactgtgcaaatgcaagggataccatatgctgtttccatttatatttatgtcctgtagtcagttaaacctatctatgtccatatatgcaaagtgtttaacctttttgtatacgcataaaagaaattcctgtagcgcaggctggcctcaaactggtaatgtagccaaggataaccttgaatttctgatcctcctgcctcctcttcctgaaggctgaggttacagacatgcaccattgccactagttcatgaagtgctggagatggaacccaaggctttgtgcatgttaccaactgagttatactccctccccctcatcctcttcgttgcatcagggtctcaagtattccaggctgactttgaactcagtgtgtagccaagggtgaccctgaactcttggtccagatggacgcaggaggatcacatacccaaccttagcatcctttctcctagcccctttagatagatgatacttaatgactctcttgctgagggatgccacaccggggcttcctgctcctatctaacttcaatttaatacccactagtcaatctctcctcaactccctgctactctccccaaactctagtaagcccacttctatttcttggggagagagaaggttgacttttcttatgtcctatgtatgaatcagactgtgccatgactgtgcctctgtgcctggagcagctggattttggaaaagaaaagggacatctccttgcagtgtgaatgagagccagccacatgctgggccttacttctccgtgtaactgaacttaagaagcaaagtaaataccacaaccttactaccccatgccaacagaaagcataaaatggttgggatgttattcaggtatcagggtcactggagaagcctcccccagtttactccaggaaaaacagatgtatgcttttatttaattctgtaagatgttcatattatttatgatggattcagtaagttaatatttattacaacgtatataatattctaataaagcagaagggacaactc

SEQ ID NO: 89 - protein, 134 aa, Homo sapiens
MRMLLHLSLLALGAAYVYAIPTEIPTSALVKETLALLSTHRTLLIANETLRIPVPVHKNHQLCTEEIFQGIGTLESQTVQGGTVERLFKNLSLIKKYIDGQKKKCGEERRRVNQFLDYLQEFLGVMNTEWIIES

SEQ ID NO: 90 - protein, 134 aa, Homo sapiens; identical to SEQ ID NO: 89

SEQ ID NO: 91 - protein, 133 aa, Mus musculus
MRRMLLHLSVLTLSCVWATAMEIPMSTVVKETLTQLSAHRALLTSNETMRLPVPTHKNHQLCIGEIFQGLDILKNQTVRGGTVEMLFQNLSLIKKYIDRQKEKCGEERRRTRQFLDYLQEFLGVMSTEWAMEG

SEQ ID NO: 92 - protein, 133 aa, Mus musculus; identical to SEQ ID NO: 91

SEQ ID NO: 93 - protein, 132 aa, Mus musculus
MRRMLLHLSVLTLSCVWATAMEIPMSTVVKETLTQLSAHRALLTSNETMRLPVPTHKNHQLCIGEIFQGLDILKNQTVRGGTVEMLFQNLSLIKKYIDRQKEKCGEERRRTRQFLDYLQEFLGVMSTEWAME

SEQ ID NO: 94 - DNA, 2116 bp, Homo sapiens
acatccgcggcaacgcctccttggtgtcgtccgcttccaataacccagcttgcgtcctgcacacttgtggcttccgtgcacacattaacaactcatggttctagctcccagtcgccaagcgttgccaaggcgttgagagatcatctgggaagtcttttacccagaattgctttgattcaggccagctggtttttcctgcggtgattcggaaattcgcgaattcctctggtcctcatccaggtgcgcgggaagcaggtgcccaggagagaggggataatgaagattccatgctgatgatcccaaagattgaacctgcagaccaagcgcaaagtagaaactgaaagtacactgctggcggatcctacggaagttatggaaaaggcaaagcgcagagccacgccgtagtgtgtgccgccccccttgggatggatgaaactgcagtcgcggcgtgggtaagaggaaccagctgcagagatcaccctgcccaacacagactcggcaactccgcggaagaccagggtcctgggagtgactatgggcggtgagagcttgctcctgctccagttgcggtcatcatgactacgcccgcctcccgcagaccatgttccatgtttcttttaggtatatctttggacttcctcccctgatccttgttctgttgccagtagcatcatctgattgtgatattgaaggtaaagatggcaaacaatatgagagtgttctaatggtcagcatcgatcaattattggacagcatgaaagaaattggtagcaattgcctgaataatgaatttaacttttttaaaagacatatctgtgatgctaataaggaaggtatgtttttattccgtgctgctcgcaagttgaggcaatttcttaaaatgaatagcactggtgattttgatctccacttattaaaagtttcagaaggcacaacaatactgttgaactgcactggccaggttaaaggaagaaaaccagctgccctgggtgaagcccaaccaacaaagagtttggaagaaaataaatctttaaaggaacagaaaaaactgaatgacttgtgtttcctaaagagactattacaagagataaaaacttgttggaataaaattttgatgggcactaaagaacactgaaaaatatggagtggcaatatagaaacacgaactttagctgcatcctccaagaatctatctgcttatgcagtttttcagagtggaatgcttcctagaagttactgaatgcaccatggtcaaaacggattagggcatttgagaaatgcatattgtattactagaagatgaatacaaacaatggaaactgaatgctccagtcaacaaactatttcttatatatgtgaacatttatcaatcagtataattctgtactgatttttgtaagacaatccatgtaaggtatcagttgcaataatacttctcaaacctgtttaaatatttcaagacattaaatctatgaagtatataatggtttcaaagattcaaaattgacattgctttactgtcaaaataattttatggctcactatgaatctattatactgtattaagagtgaaaattgtcttcttctgtgctggagatgttttagagttaacaatgatatatggataatgccggtgagaataagagagtcataaaccttaagtaagcaacagcataacaaggtccaagatacctaaaagagatttcaagagatttaattaatcatgaatgtgtaacacagtgccttcaataaatggtatagcaaatgttttgacatgaaaaaaggacaatttcaaaaaaataaaataaaataaaaataaattcacctagtctaaggatgctaaaccttagtactgagttacattgtcatttatatagattataacttgtctaaataagtttgcaatttgggagatatatttttaagataataatatatgtttaccttttaattaatgaaatatctgtatttaattttgacactatatctgtatataaaatattttcatacagcattacaaattgcttactttggaatacatttctcctttgataaaataaatgagctatgtattaacaaaaaaaaaaaaaaaaaaaaaaaaaaaaaaaaaaaaaaa

SEQ ID NO: 95 - DNA, 2478 bp, Mus musculus
gggcagatcctacggaagttatggcaaagccagagcgcctgggtggccggtgatgcatgcggcccctcttgggatggatggaccaggcgtggcgtgggtgagaggagtcagctgcctgaactgccctgcccagcaccggtttgcggccacccggtggatgaccggggtcctgggagtgattatgggtggtgagagccggctcctgctgcagtcccagtcatcatgactacacccacctcccgcagaccatgttccatgtttcttttagatatatctttggaattcctccactgatccttgttctgctgcctgtcacatcatctgagtgccacattaaagacaaagaaggtaaagcatatgagagtgtactgatgatcagcatcgatgaattggacaaaatgacaggaactgatagtaattgcccgaataatgaaccaaacttttttagaaaacatgtatgtgatgatacaaaggaagctgcttttctaaatcgtgctgctcgcaagttgaagcaatttcttaaaatgaatatcagtgaagaattcaatgtccacttactaacagtatcacaaggcacacaaacactggtgaactgcacaagtaaggaagaaaaaaacgtaaaggaacagaaaaagaatgatgcatgtttcctaaagagactactgagagaaataaaaacttgttggaataaaattttgaagggcagtatataaacaggacatgtagtaacaacctccaagaatctactggttcatatacttggagaggttgaaacccttccagaagttcctggatgcctcctgctcaaataagccaagcagctgagaaatctacagtgaggtatgagatgatggacacagaaatgcagctgactgctgccgtcagcatatacatataaagatatatcaactatacagatttttgtaatgcaatcatgtcaactgcaatgcttttaaaaccgttccaaatgtttctaacactacaaagtctacaaaaagcaaggctatgaagattcagagtcaccactgttttcttagcaaaatgatggtatggttaaacattcattggtgaaccactgggggagtggaactgtcctgttttagactggagatactggagggctcacggtgatggataatgctcttgaaaacaagagtctatcttaaagcagcagcaaaaagaagcttaaggcacttaaggcatcaacaaatgtagttaaatatgaatgtataacacataacttcagtaaagagcatagcagatatttttaaataaaagtatttttaaagatagaaatgcacttattccaaagatactgaaccttagtattcagtcgcttttgacacttgtgtataataaagcttatataactgaattttcaatttgaaaagtatatttttaaaagaataatatatgctagacttttaattaatgtatatgtttaattttggcattctgtctgtctctctgtctctctctctctctctctctctctctacctatctatctatatatataattttcatatactaccaattgcgtactttggatagtgtctctttttaacctaaatgacctttattaacagctgtcaggttcccttactctcgagagtgttcattgctgcactgtcatttgatcccagttttattgaacacatatcctttaacacactcacgtccagatttagcaggagactaggaccctataactttgttaagagagaaaacactaatttcttgttttatagtagggtcttattcgtatctaaggcaggctaggattgcagacatgagccaatatgcttaattagaaacattctttttatgttaaactcatgtcttttacaagatgcctacatatatcctatgtatatgcctgtttaaatccttttttgtaaggtctgctgtcttccttcagttgtaatggaaagaaacactatgttgtggaggccaaatttctgaaagtgataagggtttgcttgtactgaattctcattctccttgctttttccagccacgtgagcatctagctatctatacgctggatgtatttgaccgatgcctgctccactggcacattgcatgtgtggtagccatgccttcttgcttctccttttccccaacccctataatgctctactcagtggtacagatagctgggattatcacaattttgagagaaacaccaattgtttaaagtttgtttcataatcaccatttgcccagaaaacagttctctcaacttgtttgcaacatgtaataatttaagaaactcaattttgttaatggactttcgataacttccttagatatcccacatctcctacgtgtcagtcctttgtcctgaggaactggtaaaatgggtaagcccttagctagcgaactgaaggcattcgcatgtgtaagataatctctatacctgcaaggctgtctggatggctccctaccaatattgaacaatattctgattttggcg

SEQ ID NO: 96 - protein, 177 aa, Homo sapiens
MFHVSFRYIFGLPPLILVLLPVASSDCDIEGKDGKQYESVLMVSIDQLLDSMKEIGSNCLNNEFNFFKRHICDANKEGMFLFRAARKLRQFLKMNSTGDFDLHLLKVSEGTTILLNCTGQVKGRKPAALGEAQPTKSLEENKSLKEQKKLNDLCFLKRLLQEIKTCWNKILMGTKEH

SEQ ID NO: 97 - protein, 177 aa, Homo sapiens; identical to SEQ ID NO: 96

SEQ ID NO: 98 - protein, 115 aa, Homo sapiens
MFHVSFRYIFGLPPLILVLLPVASSDCDIEGKDGKQYESVLMVSIDQLLDSMKEIGSNCLNNEFNFFKRHICDANKEENKSLKEQKKLNDLCFLKRLLQEIKTCWNKILMGTKEH

SEQ ID NO: 99 - protein, 64 aa, Homo sapiens
MKEIGSNCLNNEFNFFKRHICDANKEENKSLKEQKKLNDLCFLKRLLQEIKTCWNKILMGTKEH

SEQ ID NO: 100 - protein, 37 aa, Homo sapiens
MFHVSFRYIFGLPPLILVLLPVASSDCDIEGQHERNW

SEQ ID NO: 101 - protein, 31 aa, Homo sapiens
MFHVSFRYIFGLPPLILVLLPVASSDCDIEG

SEQ ID NO: 102 - protein, 133 aa, Homo sapiens
MFHVSFRYIFGLPPLILVLLPVASSDCDIEGKDGKQYESVLMVSIDQLLDSMKEIGSNCLNNEFNFFKRHICDANKVKGRKPAALGEAQPTKSLEENKSLKEQKKLNDLCFLKRLLQEIKTCWNKILMGTKEH

SEQ ID NO: 103 - protein, 154 aa, Mus musculus
MFHVSFRYIFGIPPLILVLLPVTSSECHIKDKEGKAYESVLMISIDELDKMTGTDSNCPNNEPNFFRKHVCDDTKEAAFLNRAARKLKQFLKMNISEEFNVHLLTVSQGTQTLVNCTSKEEKNVKEQKKNDACFLKRLLREIKTCWNKILKGSI

SEQ ID NO: 104 - protein, 154 aa, Mus musculus; identical to SEQ ID NO: 103

SEQ ID NO: 105 - protein, 154 aa, Mus musculus; identical to SEQ ID NO: 103

SEQ ID NO: 106 - protein, 137 aa, Mus musculus
VLLPVTSSECHIKDKEGKAYESVLMISIDELDIMTGTDSNCPNNEPNFFRKHVCDDTKEAAFLNRAARKLKQFLKMNISEEFNVHLLTVSQGTQTLVNCTSKEEKNVKEQKKNDACFLKRLLREIKTCWNKILKGSI

SEQ ID NO: 107 - DNA, 7260 bp, Homo sapiens
tcactgtcactgctaaattcagagcagattagagcctgcgcaatggaataaagtcctcaaaattgaaatgtgacattgctctcaacatctcccatctctctggatttccttttgcttcattattcctgctaaccaattcattttcagactttgtacttcagaagcaatgggaaaaatcagcagtcttccaacccaattatttaagtgctgcttttgtgatttcttgaaggtgaagatgcacaccatgtcctcctcgcatctcttctacctggcgctgtgcctgctcaccttcaccagctctgccacggctggaccggagacgctctgcggggctgagctggtggatgctcttcagttcgtgtgtggagacaggggcttttatttcaacaagcccacagggtatggctccagcagtcggagggcgcctcagacaggcatcgtggatgagtgctgcttccggagctgtgatctaaggaggctggagatgtattgcgcacccctcaagcctgccaagtcagctcgctctgtccgtgcccagcgccacaccgacatgcccaagacccagaaggaagtacatttgaagaacgcaagtagagggagtgcaggaaacaagaactacaggatgtaggaagaccctcctgaggagtgaagagtgacatgccaccgcaggatcctttgctctgcacgagttacctgttaaactttggaacacctaccaaaaaataagtttgataacatttaaaagatgggcgtttcccccaatgaaatacacaagtaaacattccaacattgtctttaggagtgatttgcaccttgcaaaaatggtcctggagttggtagattgctgttgatcttttatcaataatgttctatagaaaagaaaaaaaaatatatatatatatatatcttagtccctgcctctcaagagccacaaatgcatgggtgttgtatagatccagttgcactaaattcctctctgaatcttggctgctggagccattcattcagcaaccttgtctaagtggtttatgaattgtttccttatttgcacttctttctacacaactcgggctgtttgttttacagtgtctgataatcttgttagtctatacccaccacctcccttcataacctttatatttgccgaatttggcctcctcaaaagcagcagcaagtcgtcaagaagcacaccaattctaacccacaagattccatctgtggcatttgtaccaaatataagttggatgcattttattttagacacaaagctttatttttccacatcatgcttacaaaaaagaataatgcaaatagttgcaactttgaggccaatcatttttaggcatatgttttaaacatagaaagtttcttcaactcaaaagagttccttcaaatgatgagttaatgtgcaacctaattagtaactttcctctttttattttttccatatagagcactatgtaaatttagcatatcaattatacaggatatatcaaacagtatgtaaaactctgttttttagtataatggtgctattttgtagtttgttatatgaaagagtctggccaaaacggtaatacgtgaaagcaaaacaataggggaagcctggagccaaagatgacacaaggggaagggtactgaaaacaccatccatttgggaaagaaggcaaagtccccccagttatgccttccaagaggaacttcagacacaaaagtccactgatgcaaattggactggcgagtccagagaggaaactgtggaatggaaaaagcagaaggctaggaattttagcagtcctggtttctttttctcatggaagaaatgaacatctgccagctgtgtcatggactcaccactgtgtgaccttgggcaagtcacttcacctctctgtgcctcagtttcctcatctgcaaaatgggggcaatatgtcatctacctacctcaaaggggtggtataaggtttaaaaagataaagattcagatttttttaccctgggttgctgtaagggtgcaacatcagggcgcttgagttgctgagatgcaaggaattctataaataacccattcatagcatagctagagattggtgaattgaatgctcctgacatctcagttcttgtcagtgaagctatccaaataactggccaactagttgttaaaagctaacagctcaatctcttaaaacacttttcaaaatatgtgggaagcatttgattttcaatttgattttgaattctgcatttggttttatgaatacaaagataagtgaaaagagagaaaggaaaagaaaaaggagaaaaacaaagagatttctaccagtgaaaggggaattaattactctttgttagcactcactgactcttctatgcagttactacatatctagtaaaaccttgtttaatactataaataatattctattcattttgaaaaacacaatgattccttcttttctaggcaatataaggaaagtgatccaaaatttgaaatattaaaataatatctaataaaaagtcacaaagttatcttctttaacaaactttactcttattcttagctgtatatacatttttttaaaaagtttgttaaaatatgcttgactagagtttcagttgaaaggcaaaaacttccatcacaacaagaaatttcccatgcctgctcagaagggtagcccctagctctctgtgaatgtgttttatccattcaactgaaaattggtatcaagaaagtccactggttagtgtactagtccatcatagcctagaaaatgatccctatctgcagatcaagattttctcattagaacaatgaattatccagcattcagatctttctagtcaccttagaactttttggttaaaagtacccaggcttgattatttcatgcaaattctatattttacattcttggaaagtctatatgaaaaacaaaaataacatcttcagtttttctcccactgggtcacctcaaggatcagaggccaggaaaaaaaaaaaagactccctggatctctgaatatatgcaaaaagaaggccccatttagtggagccagcaatcctgttcagtcaacaagtattttaactctcagtccaacattatttgaattgagcacctcaagcatgcttagcaatgttctaatcactatggacagatgtaaaagaaactatacatcatttttgccctctgcctgttttccagacatacaggttctgtggaataagatactggactcctcttcccaagatggcacttctttttatttcttgtccccagtgtgtaccttttaaaattattccctctcaacaaaactttataggcagtcttctgcagacttaacatgttttctgtcatagttagatgtgataattctaagagtgtctatgacttatttccttcacttaattctatccacagtcaaaaatcccccaaggaggaaagctgaaagatgcaactgccaatattatctttcttaactttttccaacacataatcctctccaactggattataaataaattgaaaataactcattataccaattcactattttattttttaatgaattaaaactagaaaacaaattgatgcaaaccctggaagtcagttgattactatatactacagcagaatgactcagatttcatagaaaggagcaaccaaaatgtcacaaccaaaactttacaagctttgcttcagaattagattgctttataattcttgaatgaggcaatttcaagatatttgtaaaagaacagtaaacattggtaagaatgagctttcaactcataggcttatttccaatttaattgaccatactggatacttaggtcaaatttctgttctctcttgcccaaataatattaaagtattatttgaactttttaagatgaggcagttcccctgaaaaagttaatgcagctctccatcagaatccactcttctagggatatgaaaatctcttaacacccaccctacatacacagacacacacacacacacacacacacacacacacacacacacattcaccctaaggatccaatggaatactgaaaagaaatcacttccttgaaaattttattaaaaaacaaacaaacaaacaaaaagcctgtccacccttgagaatccttcctctccttggaacgtcaatgtttgtgtagatgaaaccatctcatgctctgtggctccagggtttctgttactattttatgcacttgggagaaggcttagaataaaagatgtagcacattttgctttcccatttattgtttggccagctatgccaatgtggtgctattgtttctttaagaaagtacttgactaaaaaaaaaagaaaaaaagaaaaaaaagaaagcatagacatatttttttaaagtataaaaacaacaattctatagatagatggcttaataaaatagcattaggtctatctagccaccaccacctttcaactttttatcactcacaagtagtgtactgttcaccaaattgtgaatttgggggtgcaggggcaggagttggaaattttttaaagttagaaggctccattgttttgttggctctcaaacttagcaaaattagcaatatattatccaatcttctgaacttgatcaagagcatggagaataaacgcgggaaaaaagatcttataggcaaatagaagaatttaaaagataagtaagttccttattgatttttgtgcactctgctctaaaacagatattcagcaagtggagaaaataagaacaaagagaaaaaatacatagatttacctgcaaaaaatagcttctgccaaatcccccttgggtattctttggcatttactggtttatagaagacattctcccttcacccagacatctcaaagagcagtagctctcatgaaaagcaatcactgatctcatttgggaaatgttggaaagtatttccttatgagatgggggttatctactgataaagaaagaatttatgagaaattgttgaaagagatggctaacaatctgtgaagattttttgtttcttggttttgtttttttttttttttttactttatacagtctttatgaatttcttaatgttcaaaatgacttggttcttttcttcttttttttatatcagaatgaggaataataagttaaacccacatagactctttaaaactataggctagatagaaatgtatgtttgacttgttgaagctataatcagactatttaaaatgttttgctatttttaatcttaaaagattgtgctaatttattagagcagaacctgtttggctctcctcagaagaaagaatctttccattcaaatcacatggctttccaccaatattttcaaaagataaatctgatttatgcaatggcatcatttattttaaaacagaagaattgtgaaagtttatgcccctcccttgcaaagaccataaagtccagatctggtaggggggcaacaacaaaaggaaaatgttgttgattcttggttttggattttgttttgttttcaatgctagtgtttaatcctgtagtacatatttgcttattgctattttaatattttataagaccttcctgttaggtattagaaagtgatacatagatatcttttttgtgtaatttctatttaaaaaagagagaagactgtcagaagctttaagtgcatatggtacaggataaagatatcaatttaaataaccaattcctatctggaacaatgcttttgttttttaaagaaacctctcacagataagacagaggcccaggggatttttgaagctgtctttattctgcccccatcccaacccagcccttattattttagtatctgcctcagaattttatagagggctgaccaagctgaaactctagaattaaaggaacctcactgaaaacatatatttcacgtgttccctctcttttttttcctttttgtgagatggggtctcgcactgtcccccaggctggagtgcagtggcatgatctcggctcactgcaacctccacctcctgggtttaagcgattctcctgcctcagcctcctgagtagctgggattacaggcacccaccactatgcccggctaattttttggatttttaatagagacggggttttaccatgttggccaggttggactcaaactcctgaccttgtgatttgcccgcctcagcctcccaaattgctgggattacaggcatgagccaccacaccctgcccatgtgttccctcttaatgtatgattacatggatcttaaacatgatccttctctcctcattcttcaactatctttgatggggtctttcaaggggaaaaaaatccaagcttttttaaagtaaaaaaaaaaaaagagaggacacaaaaccaaatgttactgctcaactgaaatatgagttaagatggagacagagtttctcctaataaccggagctgaattacctttcactttcaaaaacatgaccttccacaatccttagaatctgcctttttttatattactgaggcctaaaagtaaacattactcattttattttgcccaaaatgcactgatgtaaagtaggaaaaataaaaacagagctctaaaatccctttcaagccacccattgaccccactcaccaactcatagcaaagtcacttctgttaatcccttaatctgattttgtttggatatttatcttgtacccgctgctaaacacactgcaggagggactctgaaacctcaagctgtctacttacatcttttatctgtgtctgtgtatcatgaaaatgtctattcaaaatatcaaaacctttcaaatatcacgcagcttatattcagtttacataaaggccccaaataccatgtcagatctttttggtaaaagagttaatgaactatgagaattgggattacatcatgtattttgcctcatgtatttttatcacacttataggccaagtgtgataaataaacttacagacactgaattaatttcccctgctactttgaaaccagaaaataatgactggccattcgttacatctgtcttagttgaaaagcatattttttattaaattaattctgattgtatttgaaattattattcaattcacttatggcagaggaatatcaatcctaatgacttctaaaaatgtaactaattgaatcattatcttacatttactgtttaataagcatattttgaaaatgtatggctagagtgtcataataaaatggtatatctttctttagtaattacaaaaaaaaaaaaaaaaaaaaaaaa

SEQ ID NO: 108 - DNA, 1536 bp, Mus musculus
gacttcttgaagataaagatacacatcatgtcgtcttcacacctcttctacctggcgctctgcttgctcaccttcaccagctccaccacagctggaccagagaccctttgcggggctgagctggtggatgctcttcagttcgtgtgtggaccgaggggcttttacttcaacaagcccacaggctatggctccagcattcggagggcacctcagacaggcattgtggatgagtgttgcttccggagctgtgatctgaggagactggagatgtactgtgccccactgaagcctacaaaagcagcccgctctatccgtgcccagcgccacactgacatgcccaagactcagaagtccccgtccctatcgacaaacaagaaaacgaagctgcaaaggagaaggaaaggaagtacatttgaagaacacaagtagaggaagtgcaggaaacaagacctacagaatgtaggaggagcctcccacggagcagaaaatgccacatcaccgcaggatcctttgctgcttgagcaacctgcaaaacatcgaaacacctaccaaataacaataataagtccaataacattacaaagatgggcatttcccccaatgaaatatacaagtaaacattccaacatcgtctttaggagtgtttgtttaaaaagctttgcaccttgcaaaagtggtcctggcgtgggtagattgctgttgatcctttatcaataacattctatagagaaaaaaatatatatatataactatatctcctagtccctgcctctaaagagccgaaaatgcatggatgttgtagagatccagttgctctaagtttctctctgaattttggctgctgaagccattcatttagcaactgtgtagaggtggtttatgaatggttcccttatcttcacctcttcccacgtagctcaagctgcttgttttacagagtctaatcatcttgtctagctccattagacacaccctttcctaacacttgtatttgttgaatttggcctccttaagagcaatagcaaataagtagtcaagtggcctaccaagttttaacgtacctgactccatctgtggcatttgtaccaaatataagttgaatgcatttattttagacacaaagctttattttttttgacattgtgtttcaagaaaaaaaatagaataacaataactacaactttgaggccaatcatttttaggtgtgtgtttgaagcatagaacgtctcttaaactctcaatggttccttcaaatgataagttagtatgtaacctaagtatagcagtttctctcttttttatttttttccatatagagcactatgtaaagttagtatatcaataatacaggaaatatcaaacagtatgtaaaactctgttgttgttgttttttagtacaatggtgctattttgtagtttgttatatgaaagaatctagtcaacacagtaaaaggagaaagcaaagcaaaaacaacaaacgaaagcctggagcctaagatgacaaaacgaggaagggaactgaaaaaaaaaaaaaaa

SEQ ID NO: 109 - DNA, 2170 bp, Mus musculus
ggcatattcagaaattttaaacagatacaggctgtgctcagaaagcaggagcttactggcggctgcttgtccaacttttctctttggaaggggactttcgtgactgagctggggtttgaattttggtttaaggctctgctcttagactcaccgcgcggcgcggcaaggcaaagcctctttaggtgaatcggctgctgcttgcccctgctgctgctgtgctgcctctgtcacttgcctctggctctgtcgctcgcccctgccgctgctgctgctgctgctgctgctgctgctgctgctgctgctgccgtttgcccctgccgctgtctatgttctgccttctccttttgatcactggccctacttcaagtttccattctcagcaaaattatatccttccagacttgtgttttttcaatttgcaagcacttctaagccgctgtcaccggctccttggaggcagttgccggagggcttaattcataaaagatcccagtcaaagagtgcagcgggttttttttttgtgctgcattcaaatgcttcatcgctatgagtttttcttaggcaagtaagtggcttgggacttcgggagacaaccttgtcaagcacctaattgtgccgtcctcgcgctgccagcaagcttcagccaccttacaggagtgaagtcagcgttcatatacgctgtgtggtctggcagctgggattgtgtgtcccaaagggattgtggaatgttacctcggcaggcatgcattccacgtttggaaaatcggctccaaatgaactttctttccctgctgggtctgcagaacatttcagaagcggagctagcaatacccttcaacttttttcctgtgcttgcagcaggagatggctgaagggagctactgcatgcgtggtggtctttgaaacatagctcagggaagagaggtcagctgcctagagcgattggtacacacagggcgcctgctggctttgtactctgaggctcaaggtatttcccagtgcctgagccaggggacgatgggggaggaagggaaggagctggaacttgaatcactattctggatagccgagatagatagccatacaatggaaatgagtggcttcccttgggggaaaaagacggactccaactcccagctgtgcaatttactcattgtttaaatggacaaaaggcagtttacccaggctcagagcatacctgcctgggtgtccaaatgtaactagatgctttcacaaaccccacccacaaaacaacacctgttcttaagtcctcagttttgtgttcacctcggcctcatagtacccactctgacctgctgtgtaaacgacccggacctaccaaaatgaccgcacctgcaataaagatacacatcatgtcgtcttcacacctcttctacctggcgctctgcttgctcaccttcaccagctccaccacagctggaccagagaccctttgcggggctgagctggtggatgctcttcagttcgtgtgtggaccgaggggcttttacttcaacaagcccacaggctatggctccagcattcggagggcacctcagacaggcattgtggatgagtgttgcttccggagctgtgatctgaggagactggagatgtactgtgccccactgaagcctacaaaagcagcccgctctatccgtgcccagcgccacactgacatgcccaagactcagaagtccccgtccctatcgacaaacaagaaaacgaagctgcaaaggagaaggaaaggtgagccaaagacacacccagaaggggaacaggaggaggtaacggaggcaactcggaaaatcagaggtcccagagaaaaaagactgggctaggaactgtgagcaagcaggcaaagagggacatgcgggaacagggatgaaggacgtgcgggaacagggatgaagaaggagcagacaggagcccaggaaagccgcagaggagctgaagcaaggcagtcctcactaagctagataatgtctgtgacggaagtaagaaagtcctcctctgggatacggcacttacacatgggaagaatggtacggggaagtgtaacacctcagaaagtgacaagtgaccaggatggaacatcaacaacaataacaaccattaaaaacatgccaccaagaccttccctccccttcttaaaaatataaatcagagt

SEQ ID NO: 110 - protein, 153 aa, Homo sapiens
MGKISSLPTQLFKCCFCDFLKVKMHTMSSSHLFYLALCLLTFTSSATAGPETLCGAELVDALQFVCGDRGFYFNKPTGYGSSSRRAPQTGIVDECCFRSCDLRRLEMYCAPLKPAKSARSVRAQRHTDMPKTQKEVHLKNASRGSAGNKNYRM

SEQ ID NO: 111 - protein, 153 aa, Homo sapiens; identical to SEQ ID NO: 110

SEQ ID NO: 112 - protein, 195 aa, Homo sapiens
MGKISSLPTQLFKCCFCDFLKVKMHTMSSSHLFYLALCLLTFTSSATAGPETLCGAELVDALQFVCGDRGFYFNKPTGYGSSSRRAPQTGIVDECCFRSCDLRRLEMYCAPLKPAKSARSVRAQRHTDMPKTQKYQPPSTNKNTKSQRRKGWPKTHPGGEQKEGTEASLQIRGKKKEQRREIGSRNAECRGKKGK

SEQ ID NO: 113 - protein, 139 aa, Homo sapiens
LKVKMHTMSSSHLFYLALCLLTFTSSATAGPETLCGAELVDALQFVCGDRGFYFNKPTGYGSSSRRAPQTGIVDECCFRSCDLRRLEMYCAPLKPAKSARSVRAQRHTDMPKTQKYQPPSTNKNTKSQRRKGSTFEERK

SEQ ID NO: 114 - protein, 137 aa, Homo sapiens
MITPTVKMHTMSSSHLFYLALCLLTFTSSATAGPETLCGAELVDALQFVCGDRGFYFNKPTGYGSSSRRAPQTGIVDECCFRSCDLRRLEMYCAPLKPAKSARSVRAQRHTDMPKTQKEVHLKNASRGSAGNKNYRM

SEQ ID NO: 115 - protein, 184 aa, Homo sapiens
HCSQHLPSLWISFCFIIPANQFIFRLCTSEAMGKISSLPTQLFKCCFCDFLKVKMHTMSSSHLFYLALCLLTFTSSATAGPETLCGAELVDALQFVCGDRGFYFNKPTGYGSSSRRAPQTGIVDECCFRSCDLRRLEMYCAPLKPAKSARSVRAQRHTDMPKTQKEVHLKNASRGSAGNKNYRM

SEQ ID NO: 116 - protein, 153 aa, Homo sapiens; identical to SEQ ID NO: 110

SEQ ID NO: 117 - protein, 21 aa, Homo sapiens
MGKISSLPTQLFKCCFCDFLK

SEQ ID NO: 118 - protein, 130 aa, Homo sapiens
MHTMSSSHLFYLALCLLTFTSSATAGPETLCGAELVDALQFVCGDRGFYFNKPTGYGSSSRRAPQTGIVDECCFRSCDLRRLEMYCAPLKPAKSARSVRAQRHTDMPKTQKEVHLKNASRGSAGNKNYRM

SEQ ID NO: 119 - protein, 23 aa, Homo sapiens
TGWPKTHPGGEQKEGTEASLQIR

SEQ ID NO: 120 - protein, 133 aa, Mus musculus
MSSSHLFYLALCLLTFTSSTTAGPETLCGAELVDALQFVCGPRGFYFNKPTGYGSSIRRAPQTGIVDECCFRSCDLRRLEMYCAPLKPTKAARSIRAQRHTDMPKTQKSPSLSTNKKTKLQRRRKGSTFEEHK

SEQ ID NO: 121 - protein, 165 aa, Mus musculus
MTAPAIKIHIMSSSHLFYLALCLLTFTSSTTAGPETLCGAELVDALQFVCGPRGFYFNKPTGYGSSIRRAPQTGIVDECCFRSCDLRRLEMYCAPLKPTKAARSIRAQRHTDMPKTQKSPSLSTNKKTKLQRRRKGEPKTHPEGEQEEVTEATRKIRGPREKRLG

SEQ ID NO: 122 - protein, 153 aa, Mus musculus
MGKISSLPTQLFKICLCDFLKIKIHIMSSSHLFYLALCLLTFTSSTTAGPETLCGAELVDALQFVCGPRGFYFNKPTGYGSSIRRAPQTGIVDECCFRSCDLRRLEMYCAPLKPTKAARSIRAQRHTDMPKTQKEVHLKNTSRGSAGNKTYRM

SEQ ID NO: 123 - protein, 159 aa, Mus musculus
MGKISSLPTQLFKICLCDFLKIKIHIMSSSHLFYLALCLLTFTSSTTAGPETLCGAELVDALQFVCGPRGFYFNKPTGYGSSIRRAPQTGIVDECCFRSCDLRRLEMYCAPLKPTKAARSIRAQRHTDMPKTQKSPSLSTNKKTKLQRRRKGSTFEEHK

SEQ ID NO: 124 - protein, 153 aa, Mus musculus; identical to SEQ ID NO: 122

SEQ ID NO: 125 - protein, 127 aa, Mus musculus
MSSSHLFYLALCLLTFTSSTTAGPETLCGAELVDALQFVCGPRGFYFNKPTGYGSSIRRAPQTGIVDECCFRSCDLRRLEMYCAPLKPTKAARSIRAQRHTDMPKTQKEVHLKNTSRGSAGNKTYRM

SEQ ID NO: 126 - DNA, 1629 bp, Homo sapiens
acacatcaggggcttgctcttgcaaaaccaaaccacaagacagacttgcaaaagaaggcatgcacagctcagcactgctctgttgcctggtcctcctgactggggtgagggccagcccaggccagggcacccagtctgagaacagctgcacccacttcccaggcaacctgcctaacatgcttcgagatctccgagatgccttcagcagagtgaagactttctttcaaatgaaggatcagctggacaacttgttgttaaaggagtccttgctggaggactttaagggttacctgggttgccaagccttgtctgagatgatccagttttacctggaggaggtgatgccccaagctgagaaccaagacccagacatcaaggcgcatgtgaactccctgggggagaacctgaagaccctcaggctgaggctacggcgctgtcatcgatttcttccctgtgaaaacaagagcaaggccgtggagcaggtgaagaatgcctttaataagctccaagagaaaggcatctacaaagccatgagtgagtttgacatcttcatcaactacatagaagcctacatgacaatgaagatacgaaactgagacatcagggtggcgactctatagactctaggacataaattagaggtctccaaaatcggatctggggctctgggatagctgacccagccccttgagaaaccttattgtacctctcttatagaatatttattacctctgatacctcaacccccatttctatttatttactgagcttctctgtgaacgatttagaaagaagcccaatattataatttttttcaatatttattattttcacctgtttttaagctgtttccatagggtgacacactatggtatttgagtgttttaagataaattataagttacataagggaggaaaaaaaatgttctttggggagccaacagaagcttccattccaagcctgaccacgctttctagctgttgagctgttttccctgacctccctctaatttatcttgtctctgggcttggggcttcctaactgctacaaatactcttaggaagagaaaccagggagcccctttgatgattaattcaccttccagtgtctcggagggattcccctaacctcattccccaaccacttcattcttgaaagctgtggccagcttgttatttataacaacctaaatttggttctaggccgggcgcggtggctcacgcctgtaatcccagcactttgggaggctgaggcgggtggatcacttgaggtcaggagttcctaaccagcctggtcaacatggtgaaaccccgtctctactaaaaatacaaaaattagccgggcatggtggcgcgcacctgtaatcccagctacttgggaggctgaggcaagagaattgcttgaacccaggagatggaagttgcagtgagctgatatcatgcccctgtactccagcctgggtgacagagcaagactctgtctcaaaaaataaaaataaaaataaatttggttctaatagaactcagttttaactagaatttattcaattcctctgggaatgttacattgtttgtctgtcttcatagcagattttaattttgaataaataaatgtatcttattcacatc

SEQ ID NO: 127 - DNA, 1314 bp, Mus musculus
ggggggggggatttagagacttgctcttgcactaccaaagccacaaagcagccttgcagaaaagagagctccatcatgcctggctcagcactgctatgctgcctgctcttactgactggcatgaggatcagcaggggccagtacagccgggaagacaataactgcacccacttcccagtcggccagagccacatgctcctagagctgcggactgccttcagccaggtgaagactttctttcaaacaaaggaccagctggacaacatactgctaaccgactccttaatgcaggactttaagggttacttgggttgccaagccttatcggaaatgatccagttttacctggtagaagtgatgccccaggcagagaagcatggcccagaaatcaaggagcatttgaattccctgggtgagaagctgaagaccctcaggatgcggctgaggcgctgtcatcgatttctcccctgtgaaaataagagcaaggcagtggagcaggtgaagagtgattttaataagctccaagaccaaggtgtctacaaggccatgaatgaatttgacatcttcatcaactgcatagaagcatacatgatgatcaaaatgaaaagctaaaacacctgcagtgtgtattgagtctgctggactccaggacctagacagagctctctaaatctgatccagggatcttagctaacggaaacaactccttggaaaacctcgtttgtacctctctccgaaatatttattacctctgatacctcagttcccattctatttattcactgagcttctctgtgaactatttagaaagaagcccaatattataattttacagtatttattatttttaacctgtgtttaagctgtttccattggggacactttatagtatttaaagggagattatattatatgatgggaggggttcttccttgggaagcaattgaagcttctattctaaggctggccacacttgagagctgcagggccctttgctatggtgtcctttcaattgctctcatccctgagttcagagctcctaagagagttgtgaagaaactcatgggtcttgggaagagaaaccagggagatcctttgatgatcattcctgcagcagctcagagggttcccctactgtcatcccccagccgcttcatccctgaaaactgtggccagtttgttatttataaccacctaaaattagttctaatagaactcatttttaactagaagtaatgcaattcctctgggaatggtgtattgtttgtctgcctttgtagcagcatctaattttgaataaatggatcttattcg

SEQ ID NO: 128 - protein, 178 aa, Homo sapiens
MHSSALLCCLVLLTGVRASPGQGTQSENSCTHFPGNLPNMLRDLRDAFSRVKTFFQMKDQLDNLLLKESLLEDFKGYLGCQALSEMIQFYLEEVMPQAENQDPDIKAHVNSLGENLKTLRLRLRRCHRFLPCENKSKAVEQVKNAFNKLQEKGIYKAMSEFDIFINYIEAYMTMKIRN

SEQ ID NO: 129 - protein, 178 aa, Homo sapiens; identical to SEQ ID NO: 128

SEQ ID NO: 130 - protein, 178 aa, Homo sapiens
MHSSALLCCLVLLTGVRASPGQGTQSENSCTHFPGNLPNMLRDLRDAFSRVKTFFQMKDQLDNLLLKESLLEDFKGYLGCQALSEMIQFYLEEVMPQAENQDPDIKAHVNSLGENLKTLRLRLRRCLRFLPCENKSKAVEQVKNAFNKLQEKGIYKAMSEFDIFINYIEAYMTMKIRN

SEQ ID NO: 131 - protein, 178 aa, Homo sapiens; identical to SEQ ID NO: 128

SEQ ID NO: 132 - protein, 55 aa, Homo sapiens
MHSSALLCCLVLLTGVRASPGQGTQSENSCTHFPGNLPNMLRDLRDAFSRVKTFF

SEQ ID NO: 133 - protein, 160 aa, Homo sapiens
SPGQGTQSENSCTHFPGNLPNMLRDLRDAFSRVKTFFQMKDQLDNLLLKESLLEDFKGYLGCQALSEMIQFYLEEVMPQAENQDPDIKAHVNSLGENLKTLRLRLRRCHRFLPCENKSKAVEQVKNAFNKLQEKGIYKAMSEFDIFINYIEAYMTMKIRN

SEQ ID NO: 134 - protein, 14 aa, Homo sapiens
MHSSALLCCLVLLT

SEQ ID NO: 135 - protein, 178 aa, Mus musculus
MPGSALLCCLLLLTGMRISRGQYSREDNNCTHFPVGQSHMLLELRTAFSQVKTFFQTKDQLDNILLTDSLMQDFKGYLGCQALSEMIQFYLVEVMPQAEKHGPEIKEHLNSLGEKLKTLRMRLRRCHRFLPCENKSKAVEQVKSDFNKLQDQGVYKAMNEFDIFINCIEAYMMIKMKS

SEQ ID NO: 136 - protein, 178 aa, Mus musculus
MPGSALLCCLLLLTGMRISRGQYSREDNNCTHFPVGQSHMLLELRTAFSQVKTFFQTKDQLDNILLTDSLMQDFKGYLGCQALSEMIQFYLVEVMPQAEKHGPEIKEHLNSLGEKLKTLRMRLRRCHRFLKCENKSKAVEQVKSDFNKLEDQGVYKAMNEFDIFINCIEAYMMIKMKS

SEQ ID NO: 137 - DNA, 1240 bp, Homo sapiens
cacattgttctgatcatctgaagatcagctattagaagagaaagatcagttaagtcctttggacctgatcagcttgatacaagaactactgatttcaacttctttggcttaattctctcggaaacgatgaaatatacaagttatatcttggcttttcagctctgcatcgttttgggttctcttggctgttactgccaggacccatatgtaaaagaagcagaaaaccttaagaaatattttaatgcaggtcattcagatgtagcggataatggaactcttttcttaggcattttgaagaattggaaagaggagagtgacagaaaaataatgcagagccaaattgtctccttttacttcaaactttttaaaaactttaaagatgaccagagcatccaaaagagtgtggagaccatcaaggaagacatgaatgtcaagtttttcaatagcaacaaaaagaaacgagatgacttcgaaaagctgactaattattcggtaactgacttgaatgtccaacgcaaagcaatacatgaactcatccaagtgatggctgaactgtcgccagcagctaaaacagggaagcgaaaaaggagtcagatgctgtttcgaggtcgaagagcatcccagtaatggttgtcctgcctgcaatatttgaattttaaatctaaatctatttattaatatttaacattatttatatggggaatatatttttagactcatcaatcaaataagtatttataatagcaacttttgtgtaatgaaaatgaatatctattaatatatgtattatttataattcctatatcctgtgactgtctcacttaatcctttgttttctgactaattaggcaaggctatgtgattacaaggctttatctcaggggccaactaggcagccaacctaagcaagatcccatgggttgtgtgtttatttcacttgatgatacaatgaacacttataagtgaagtgatactatccagttactgccggtttgaaaatatgcctgcaatctgagccagtgctttaatggcatgtcagacagaacttgaatgtgtcaggtgaccctgatgaaaacatagcatctcaggagatttcatgcctggtgcttccaaatattgttgacaactgtgactgtacccaaatggaaagtaactcatttgttaaaattatcaatatctaatatatatgaataaagtgtaagttcacaacaaaaaaaaaaaaaaaaaaaaaaaaaaaaaa

SEQ ID NO: 138 - DNA, 1208 bp, Mus musculus
gatagctgccatcggctgacctagagaagacacatcagctgatcctttggaccctctgacttgagacagaagttctgggcttctcctcctgcggcctagctctgagacaatgaacgctacacactgcatcttggctttgcagctcttcctcatggctgtttctggctgttactgccacggcacagtcattgaaagcctagaaagtctgaataactattttaactcaagtggcatagatgtggaagaaaagagtctcttcttggatatctggaggaactggcaaaaggatggtgacatgaaaatcctgcagagccagattatctctttctacctcagactctttgaagtcttgaaagacaatcaggccatcagcaacaacataagcgtcattgaatcacacctgattactaccttcttcagcaacagcaaggcgaaaaaggatgcattcatgagtattgccaagtttgaggtcaacaacccacaggtccagcgccaagcattcaatgagctcatccgagtggtccaccagctgttgccggaatccagcctcaggaagcggaaaaggagtcgctgctgattcggggtggggaagagattgtcccaataagaataattctgccagcactatttgaatttttaaatctaaacctatttattaatatttaaaactatttatatggagaatctattttagatgcatcaaccaaagaagtatttatagtaacaacttatatgtgataagagtgaattcctattaatatatgtgttatttataatttctgtctcctcaactatttctctttgaccaattaattattctttctgactaattagccaagactgtgattgcggggttgtatctgggggtgggggacagccaagcggctgactgaactcagattgtagcttgtacctttacttcactgaccaataagaaacattcagagctgcagtgaccccgggaggtgctgctgatgggaggagatgtctacactccgggccagcgctttaacagcaggccagacagcactcgaatgagtcaggtagtaacaggctgtccctgaaagaaagcagtgtctcaagagacttgacacctggtgcttccctatacagctgaaaactgtgactacacccgaatgacaaataactcgctcatttatagtttatcactgtctaattgcatatgaataaagtatacctttgcaacc

SEQ ID NO: 139 - protein, 166 aa, Homo sapiens
MKYTSYILAFQLCIVLGSLGCYCQDPYVKEAENLKKYFNAGHSDVADNGTLFLGILKNWKEESDRKIMQSQIVSFYFKLFKNFKDDQSIQKSVETIKEDMNVKFFNSNKKKRDDFEKLTNYSVTDLNVQRKAIHELIQVMAELSPAAKTGKRKRSQMLFRGRRASQ

SEQ ID NO: 140 - protein, 166 aa, Homo sapiens; identical to SEQ ID NO: 139

SEQ ID NO: 141 - protein, 144 aa, Homo sapiens [sequence omitted]

SEQ ID NO: 142 - protein, 134 aa, Homo sapiens [sequence omitted]

SEQ ID NO: 143 - protein, 133 aa, Homo sapiens [sequence omitted]

SEQ ID NO: 144 - protein, 133 aa, Homo sapiens [sequence omitted]

SEQ ID NO: 145 - protein, 130 aa, Homo sapiens [sequence omitted]

SEQ ID NO: 146 - protein, 125 aa, Homo sapiens [sequence omitted]

SEQ ID NO: 147 - protein, 124 aa, Homo sapiens [sequence omitted]

SEQ ID NO: 148 - protein, 166 aa, Homo sapiens
MKYTSYILAFQLCIVLGSLGCYCQDPYVKEAENLKKYFNAGHSDVADNGTLFLGILKNWKEESDRKIMQSQIVSFYFKLFKNFKDDQSIQKSVETIKEDMNVKFFNSNKKKRDDFEKLTNYSVTDLNVQRKAIHELIQVMAELSPAAKTGKRKRSQMLFQGRRASQ

SEQ ID NO: 149 - protein, 144 aa, Homo sapiens [sequence omitted]

SEQ ID NO: 150 - protein, 143 aa, Homo sapiens
QDPYVKEAENLKKYFNAGHSDVADNGTLFLGILKNWKEESDRKIMQSQIVSFYFKLFKNFKDDQSIQKSVETIKEDMNVKFFNSNKKKRDDFEKLTNYSVTDLNVQRKAIHELIQVMAELPPAAETGKRKRSQMLFRGRRASQ

SEQ ID NO: 151 - protein, 155 aa, Mus musculus
MNATHCILALQLFLMAVSGCYCHGTVIESLESLNNYFNSSGIDVEEKSLFLDIWRNWQKDGDMKILQSQIISFYLRLFEVLKDNQAISNNISVIESHLITTFFSNSKAKKDAFMSIAKFEVNNPQVQRQAFNELIRVVHQLLPESSLRKRKRSRC

SEQ ID NO: 152 - protein, 155 aa, Mus musculus; identical to SEQ ID NO: 151

SEQ ID NO: 153 - protein, 155 aa, Mus musculus; identical to SEQ ID NO: 151

SEQ ID NO: 154 - DNA, 3665 bp, Homo sapiens
ggcttggggcagccgggtagctcggaggtcgtggcgctgggggctagcaccagcgctctgtcgggaggcgcagcggttaggtggaccggtcagcggactcaccggccagggcgctcggtgctggaatttgatattcattgatccgggttttatccctcttcttttttcttaaacatttttttttaaaactgtattgtttctcgttttaatttatttttgcttgccattccccacttgaatcgggccgacggcttggggagattgctctacttccccaaatcactgtggattttggaaaccagcagaaagaggaaagaggtagcaagagctccagagagaagtcgaggaagagagagacggggtcagagagagcgcgcgggcgtgcgagcagcgaaagcgacaggggcaaagtgagtgacctgcttttgggggtgaccgccggagcgcggcgtgagccctcccccttgggatcccgcagctgaccagtcgcgctgacggacagacagacagacaccgcccccagccccagctaccacctcctccccggccggcggcggacagtggacgcggcggcgagccgcgggcaggggccggagcccgcgcccggaggcggggtggagggggtcggggctcgcggcgtcgcactgaaacttttcgtccaacttctgggctgttctcgcttcggaggagccgtggtccgcgcgggggaagccgagccgagcggagccgcgagaagtgctagctcgggccgggaggagccgcagccggaggagggggaggaggaagaagagaaggaagaggagagggggccgcagtggcgactcggcgctcggaagccgggctcatggacgggtgaggcggcggtgtgcgcagacagtgctccagccgcgcgcgctccccaggccctggcccgggcctcgggccggggaggaagagtagctcgccgaggcgccgaggagagcgggccgccccacagcccgagccggagagggagcgcgagccgcgccggccccggtcgggcctccgaaaccatgaactttctgctgtcttgggtgcattggagccttgccttgctgctctacctccaccatgccaagtggtcccaggctgcacccatggcagaaggaggagggcagaatcatcacgaagtggtgaagttcatggatgtctatcagcgcagctactgccatccaatcgagaccctggtggacatcttccaggagtaccctgatgagatcgagtacatcttcaagccatcctgtgtgcccctgatgcgatgcgggggctgctgcaatgacgagggcctggagtgtgtgcccactgaggagtccaacatcaccatgcagattatgcggatcaaacctcaccaaggccagcacataggagagatgagcttcctacagcacaacaaatgtgaatgcagaccaaagaaagatagagcaagacaagaaaaaaaatcagttcgaggaaagggaaaggggcaaaaacgaaagcgcaagaaatcccggtataagtcctggagcgtgtacgttggtgcccgctgctgtctaatgccctggagcctccctggcccccatccctgtgggccttgctcagagcggagaaagcatttgtttgtacaagatccgcagacgtgtaaatgttcctgcaaaaacacagactcgcgttgcaaggcgaggcagcttgagttaaacgaacgtacttgcagatgtgacaagccgaggcggtgagccgggcaggaggaaggagcctccctcagggtttcgggaaccagatctctcaccaggaaagactgatacagaacgatcgatacagaaaccacgctgccgccaccacaccatcaccatcgacagaacagtccttaatccagaaacctgaaatgaaggaagaggagactctgcgcagagcactttgggtccggagggcgagactccggcggaagcattcccgggcgggtgacccagcacggtccctcttggaattggattcgccattttatttttcttgctgctaaatcaccgagcccggaagattagagagttttatttctgggattcctgtagacacacccacccacatacatacatttatatatatatatattatatatatataaaaataaatatctctattttatatatataaaatatatatattctttttttaaattaacagtgctaatgttattggtgtcttcactggatgtatttgactgctgtggacttgagttgggaggggaatgttcccactcagatcctgacagggaagaggaggagatgagagactctggcatgatcttttttttgtcccacttggtggggccagggtcctctcccctgcccaggaatgtgcaaggccagggcatgggggcaaatatgacccagttttgggaacaccgacaaacccagccctggcgctgagcctctctaccccaggtcagacggacagaaagacagatcacaggtacagggatgaggacaccggctctgaccaggagtttggggagcttcaggacattgctgtgctttggggattccctccacatgctgcacgcgcatctcgcccccaggggcactgcctggaagattcaggagcctgggcggccttcgcttactctcacctgcttctgagttgcccaggagaccactggcagatgtcccggcgaagagaagagacacattgttggaagaagcagcccatgacagctccccttcctgggactcgccctcatcctcttcctgctccccttcctggggtgcagcctaaaaggacctatgtcctcacaccattgaaaccactagttctgtccccccaggagacctggttgtgtgtgtgtgagtggttgaccttcctccatcccctggtccttcccttcccttcccgaggcacagagagacagggcaggatccacgtgcccattgtggaggcagagaaaagagaaagtgttttatatacggtacttatttaatatccctttttaattagaaattaaaacagttaatttaattaaagagtagggttttttttcagtattcttggttaatatttaatttcaactatttatgagatgtatcttttgctctctcttgctctcttatttgtaccggtttttgtatataaaattcatgtttccaatctctctctccctgatcggtgacagtcactagcttatcttgaacagatatttaattttgctaacactcagctctgccctccccgatcccctggctccccagcacacattcctttgaaataaggtttcaatatacatctacatactatatatatatttggcaacttgtatttgtgtgtatatatatatatatatgtttatgtatatatgtgattctgataaaatagacattgctattctgttttttatatgtaaaaacaaaacaagaaaaaatagagaattctacatactaaatctctctccttttttaattttaatatttgttatcatttatttattggtgctactgtttatccgtaataattgtggggaaaagatattaacatcacgtctttgtctctagtgcagtttttcgagatattccgtagtacatatttatttttaaacaacgacaaagaaatacagatatatcttaaaaaaaaaaaagcattttgtattaaagaatttaattctgatctcaaaaaaaaaaaaa

SEQ ID NO: 155 - DNA, 3596 bp, Homo sapiens
ggcttggggcagccgggtagctcggaggtcgtggcgctgggggctagcaccagcgctctgtcgggaggcgcagcggttaggtggaccggtcagcggactcaccggccagggcgctcggtgctggaatttgatattcattgatccgggttttatccctcttcttttttcttaaacatttttttttaaaactgtattgtttctcgttttaatttatttttgcttgccattccccacttgaatcgggccgacggcttggggagattgctctacttccccaaatcactgtggattttggaaaccagcagaaagaggaaagaggtagcaagagctccagagagaagtcgaggaagagagagacggggtcagagagagcgcgcgggcgtgcgagcagcgaaagcgacaggggcaaagtgagtgacctgcttttgggggtgaccgccggagcgcggcgtgagccctcccccttgggatcccgcagctgaccagtcgcgctgacggacagacagacagacaccgcccccagccccagctaccacctcctccccggccggcggcggacagtggacgcggcggcgagccgcgggcaggggccggagcccgcgcccggaggcggggtggagggggtcggggctcgcggcgtcgcactgaaacttttcgtccaacttctgggctgttctcgcttcggaggagccgtggtccgcgcgggggaagccgagccgagcggagccgcgagaagtgctagctcgggccgggaggagccgcagccggaggagggggaggaggaagaagagaaggaagaggagagggggccgcagtggcgactcggcgctcggaagccgggctcatggacgggtgaggcggcggtgtgcgcagacagtgctccagccgcgcgcgctccccaggccctggcccgggcctcgggccggggaggaagagtagctcgccgaggcgccgaggagagcgggccgccccacagcccgagccggagagggagcgcgagccgcgccggccccggtcgggcctccgaaaccatgaactttctgctgtcttgggtgcattggagccttgccttgctgctctacctccaccatgccaagtggtcccaggctgcacccatggcagaaggaggagggcagaatcatcacgaagtggtgaagttcatggatgtctatcagcgcagctactgccatccaatcgagaccctggtggacatcttccaggagtaccctgatgagatcgagtacatcttcaagccatcctgtgtgcccctgatgcgatgcgggggctgctgcaatgacgagggcctggagtgtgtgcccactgaggagtccaacatcaccatgcagattatgcggatcaaacctcaccaaggccagcacataggagagatgagcttcctacagcacaacaaatgtgaatgcagaccaaagaaagatagagcaagacaagaaaaaaaatcagttcgaggaaagggaaaggggcaaaaacgaaagcgcaagaaatcccgtccctgtgggccttgctcagagcggagaaagcatttgtttgtacaagatccgcagacgtgtaaatgttcctgcaaaaacacagactcgcgttgcaaggcgaggcagcttgagttaaacgaacgtacttgcagatgtgacaagccgaggcggtgagccgggcaggaggaaggagcctccctcagggtttcgggaaccagatctctcaccaggaaagactgatacagaacgatcgatacagaaaccacgctgccgccaccacaccatcaccatcgacagaacagtccttaatccagaaacctgaaatgaaggaagaggagactctgcgcagagcactttgggtccggagggcgagactccggcggaagcattcccgggcgggtgacccagcacggtccctcttggaattggattcgccattttatttttcttgctgctaaatcaccgagcccggaagattagagagttttatttctgggattcctgtagacacacccacccacatacatacatttatatatatatatattatatatatataaaaataaatatctctattttatatatataaaatatatatattctttttttaaattaacagtgctaatgttattggtgtcttcactggatgtatttgactgctgtggacttgagttgggaggggaatgttcccactcagatcctgacagggaagaggaggagatgagagactctggcatgatcttttttttgtcccacttggtggggccagggtcctctcccctgcccaggaatgtgcaaggccagggcatgggggcaaatatgacccagttttgggaacaccgacaaacccagccctggcgctgagcctctctaccccaggtcagacggacagaaagacagatcacaggtacagggatgaggacaccggctctgaccaggagtttggggagcttcaggacattgctgtgctttggggattccctccacatgctgcacgcgcatctcgcccccaggggcactgcctggaagattcaggagcctgggcggccttcgcttactctcacctgcttctgagttgcccaggagaccactggcagatgtcccggcgaagagaagagacacattgttggaagaagcagcccatgacagctccccttcctgggactcgccctcatcctcttcctgctccccttcctggggtgcagcctaaaaggacctatgtcctcacaccattgaaaccactagttctgtccccccaggagacctggttgtgtgtgtgtgagtggttgaccttcctccatcccctggtccttcccttcccttcccgaggcacagagagacagggcaggatccacgtgcccattgtggaggcagagaaaagagaaagtgttttatatacggtacttatttaatatccctttttaattagaaattaaaacagttaatttaattaaagagtagggttttttttcagtattcttggttaatatttaatttcaactatttatgagatgtatcttttgctctctcttgctctcttatttgtaccggtttttgtatataaaattcatgtttccaatctctctctccctgatcggtgacagtcactagcttatcttgaacagatatttaattttgctaacactcagctctgccctccccgatcccctggctccccagcacacattcctttgaaataaggtttcaatatacatctacatactatatatatatttggcaacttgtatttgtgtgtatatatatatatatatgtttatgtatatatgtgattctgataaaatagacattgctattctgttttttatatgtaaaaacaaaacaagaaaaaatagagaattctacatactaaatctctctccttttttaattttaatatttgttatcatttatttattggtgctactgtttatccgtaataattgtggggaaaagatattaacatcacgtctttgtctctagtgcagtttttcgagatattccgtagtacatatttatttttaaacaacgacaaagaaatacagatatatcttaaaaaaaaaaaagcattttgtattaaagaatttaattctgatctcaaaaaaaaaaaaa

SEQ ID NO: 156 - DNA, 3542 bp, Homo sapiens
ggcttggggcagccgggtagctcggaggtcgtggcgctgggggctagcaccagcgctctgtcgggaggcgcagcggttaggtggaccggtcagcggactcaccggccagggcgctcggtgctggaatttgatattcattgatccgggttttatccctcttcttttttcttaaacatttttttttaaaactgtattgtttctcgttttaatttatttttgcttgccattccccacttgaatcgggccgacggcttggggagattgctctacttccccaaatcactgtggattttggaaaccagcagaaagaggaaagaggtagcaagagctccagagagaagtcgaggaagagagagacggggtcagagagagcgcgcgggcgtgcgagcagcgaaagcgacaggggcaaagtgagtgacctgcttttgggggtgaccgccggagcgcggcgtgagccctcccccttgggatcccgcagctgaccagtcgcgctgacggacagacagacagacaccgcccccagccccagctaccacctcctccccggccggcggcggacagtggacgcggcggcgagccgcgggcaggggccggagcccgcgcccggaggcggggtggagggggtcggggctcgcggcgtcgcactgaaacttttcgtccaacttctgggctgttctcgcttcggaggagccgtggtccgcgcgggggaagccgagccgagcggagccgcgagaagtgctagctcgggccgggaggagccgcagccggaggagggggaggaggaagaagagaaggaagaggagagggggccgcagtggcgactcggcgctcggaagccgggctcatggacgggtgaggcggcggtgtgcgcagacagtgctccagccgcgcgcgctccccaggccctggcccgggcctcgggccggggaggaagagtagctcgccgaggcgccgaggagagcgggccgccccacagcccgagccggagagggagcgcgagccgcgccggccccggtcgggcctccgaaaccatgaactttctgctgtcttgggtgcattggagccttgccttgctgctctacctccaccatgccaagtggtcccaggctgcacccatggcagaaggaggagggcagaatcatcacgaagtggtgaagttcatggatgtctatcagcgcagctactgccatccaatcgagaccctggtggacatcttccaggagtaccctgatgagatcgagtacatcttcaagccatcctgtgtgcccctgatgcgatgcgggggctgctgcaatgacgagggcctggagtgtgtgcccactgaggagtccaacatcaccatgcagattatgcggatcaaacctcaccaaggccagcacataggagagatgagcttcctacagcacaacaaatgtgaatgcagaccaaagaaagatagagcaagacaagaaaatccctgtgggccttgctcagagcggagaaagcatttgtttgtacaagatccgcagacgtgtaaatgttcctgcaaaaacacagactcgcgttgcaaggcgaggcagcttgagttaaacgaacgtacttgcagatgtgacaagccgaggcggtgagccgggcaggaggaaggagcctccctcagggtttcgggaaccagatctctcaccaggaaagactgatacagaacgatcgatacagaaaccacgctgccgccaccacaccatcaccatcgacagaacagtccttaatccagaaacctgaaatgaaggaagaggagactctgcgcagagcactttgggtccggagggcgagactccggcggaagcattcccgggcgggtgacccagcacggtccctcttggaattggattcgccattttatttttcttgctgctaaatcaccgagcccggaagattagagagttttatttctgggattcctgtagacacacccacccacatacatacatttatatatatatatattatatatatataaaaataaatatctctattttatatatataaaatatatatattctttttttaaattaacagtgctaatgttattggtgtcttcactggatgtatttgactgctgtggacttgagttgggaggggaatgttcccactcagatcctgacagggaagaggaggagatgagagactctggcatgatcttttttttgtcccacttggtggggccagggtcctctcccctgcccaggaatgtgcaaggccagggcatgggggcaaatatgacccagttttgggaacaccgacaaacccagccctggcgctgagcctctctaccccaggtcagacggacagaaagacagatcacaggtacagggatgaggacaccggctctgaccaggagtttggggagcttcaggacattgctgtgctttggggattccctccacatgctgcacgcgcatctcgcccccaggggcactgcctggaagattcaggagcctgggcggccttcgcttactctcacctgcttctgagttgcccaggagaccactggcagatgtcccggcgaagagaagagacacattgttggaagaagcagcccatgacagctccccttcctgggactcgccctcatcctcttcctgctccccttcctggggtgcagcctaaaaggacctatgtcctcacaccattgaaaccactagttctgtccccccaggagacctggttgtgtgtgtgtgagtggttgaccttcctccatcccctggtccttcccttcccttcccgaggcacagagagacagggcaggatccacgtgcccattgtggaggcagagaaaagagaaagtgttttatatacggtacttatttaatatccctttttaattagaaattaaaacagttaatttaattaaagagtagggttttttttcagtattcttggttaatatttaatttcaactatttatgagatgtatcttttgctctctcttgctctcttatttgtaccggtttttgtatataaaattcatgtttccaatctctctctccctgatcggtgacagtcactagcttatcttgaacagatatttaattttgctaacactcagctctgccctccccgatcccctggctccccagcacacattcctttgaaataaggtttcaatatacatctacatactatatatatatttggcaacttgtatttgtgtgtatatatatatatatatgtttatgtatatatgtgattctgataaaatagacattgctattctgttttttatatgtaaaaacaaaacaagaaaaaatagagaattctacatactaaatctctctccttttttaattttaatatttgttatcatttatttattggtgctactgtttatccgtaataattgtggggaaaagatattaacatcacgtctttgtctctagtgcagtttttcgagatattccgtagtacatatttatttttaaacaacgacaaagaaatacagatatatcttaaaaaaaaaaaagcattttgtattaaagaatttaattctgatctcaaaaaaaaaaaaa

SEQ ID NO: 157 - DNA, 3507 bp, Homo sapiens
ggcttggggcagccgggtagctcggaggtcgtggcgctgggggctagcaccagcgctctgtcgggaggcgcagcggttaggtggaccggtcagcggactcaccggccagggcgctcggtgctggaatttgatattcattgatccgggttttatccctcttcttttttcttaaacatttttttttaaaactgtattgtttctcgttttaatttatttttgcttgccattccccacttgaatcgggccgacggcttggggagattgctctacttccccaaatcactgtggattttggaaaccagcagaaagaggaaagaggtagcaagagctccagagagaagtcgaggaagagagagacggggtcagagagagcgcgcgggcgtgcgagcagcgaaagcgacaggggcaaagtgagtgacctgcttttgggggtgaccgccggagcgcggcgtgagccctcccccttgggatcccgcagctgaccagtcgcgctgacggacagacagacagacaccgcccccagccccagctaccacctcctccccggccggcggcggacagtggacgcggcggcgagccgcgggcaggggccggagcccgcgcccggaggcggggtggagggggtcggggctcgcggcgtcgcactgaaacttttcgtccaacttctgggctgttctcgcttcggaggagccgtggtccgcgcgggggaagccgagccgagcggagccgcgagaagtgctagctcgggccgggaggagccgcagccggaggagggggaggaggaagaagagaaggaagaggagagggggccgcagtggcgactcggcgctcggaagccgggctcatggacgggtgaggcggcggtgtgcgcagacagtgctccagccgcgcgcgctccccaggccctggcccgggcctcgggccggggaggaagagtagctcgccgaggcgccgaggagagcgggccgccccacagcccgagccggagagggagcgcgagccgcgccggccccggtcgggcctccgaaaccatgaactttctgctgtcttgggtgcattggagccttgccttgctgctctacctccaccatgccaagtggtcccaggctgcacccatggcagaaggaggagggcagaatcatcacgaagtggtgaagttcatggatgtctatcagcgcagctactgccatccaatcgagaccctggtggacatcttccaggagtaccctgatgagatcgagtacatcttcaagccatcctgtgtgcccctgatgcgatgcgggggctgctgcaatgacgagggcctggagtgtgtgcccactgaggagtccaacatcaccatgcagattatgcggatcaaacctcaccaaggccagcacataggagagatgagcttcctacagcacaacaaatgtgaatgcagaccaaagaaagatagagcaagacaagaaaatccctgtgggccttgctcagagcggagaaagcatttgtttgtacaagatccgcagacgtgtaaatgttcctgcaaaaacacagactcgcgttgcaagatgtgacaagccgaggcggtgagccgggcaggaggaaggagcctccctcagggtttcgggaaccagatctctcaccaggaaagactgatacagaacgatcgatacagaaaccacgctgccgccaccacaccatcaccatcgacagaacagtccttaatccagaaacctgaaatgaaggaagaggagactctgcgcagagcactttgggtccggagggcgagactccggcggaagcattcccgggcgggtgacccagcacggtccctcttggaattggattcgccattttatttttcttgctgctaaatcaccgagcccggaagattagagagttttatttctgggattcctgtagacacacccacccacatacatacatttatatatatatatattatatatatataaaaataaatatctctattttatatatataaaatatatatattctttttttaaattaacagtgctaatgttattggtgtcttcactggatgtatttgactgctgtggacttgagttgggaggggaatgttcccactcagatcctgacagggaagaggaggagatgagagactctggcatgatcttttttttgtcccacttggtggggccagggtcctctcccctgcccaggaatgtgcaaggccagggcatgggggcaaatatgacccagttttgggaacaccgacaaacccagccctggcgctgagcctctctaccccaggtcagacggacagaaagacagatcacaggtacagggatgaggacaccggctctgaccaggagtttggggagcttcaggacattgctgtgctttggggattccctccacatgctgcacgcgcatctcgcccccaggggcactgcctggaagattcaggagcctgggcggccttcgcttactctcacctgcttctgagttgcccaggagaccactggcagatgtcccggcgaagagaagagacacattgttggaagaagcagcccatgacagctccccttcctgggactcgccctcatcctcttcctgctccccttcctggggtgcagcctaaaaggacctatgtcctcacaccattgaaaccactagttctgtccccccaggagacctggttgtgtgtgtgtgagtggttgaccttcctccatcccctggtccttcccttcccttcccgaggcacagagagacagggcaggatccacgtgcccattgtggaggcagagaaaagagaaagtgttttatatacggtacttatttaatatccctttttaattagaaattaaaacagttaatttaattaaagagtagggttttttttcagtattcttggttaatatttaatttcaactatttatgagatgtatcttttgctctctcttgctctcttatttgtaccggtttttgtatataaaattcatgtttccaatctctctctccctgatcggtgacagtcactagcttatcttgaacagatatttaattttgctaacactcagctctgccctccccgatcccctggctccccagcacacattcctttgaaataaggtttcaatatacatctacatactatatatatatttggcaacttgtatttgtgtgtatatatatatatatatgtttatgtatatatgtgattctgataaaatagacattgctattctgttttttatatgtaaaaacaaaacaagaaaaaatagagaattctacatactaaatctctctccttttttaattttaatatttgttatcatttatttattggtgctactgtttatccgtaataattgtggggaaaagatattaacatcacgtctttgtctctagtgcagtttttcgagatattccgtagtacatatttatttttaaacaacgacaaagaaatacagatatatcttaaaaaaaaaaaagcattttgtattaaagaatttaattctgatctcaaaaaaaaaaaaa

SEQ ID NO: 158 - DNA, 3410 bp, Homo sapiens
ggcttggggcagccgggtagctcggaggtcgtggcgctgggggctagcaccagcgctctgtcgggaggcgcagcggttaggtggaccggtcagcggactcaccggccagggcgctcggtgctggaatttgatattcattgatccgggttttatccctcttcttttttcttaaacatttttttttaaaactgtattgtttctcgttttaatttatttttgcttgccattccccacttgaatcgggccgacggcttggggagattgctctacttccccaaatcactgtggattttggaaaccagcagaaagaggaaagaggtagcaagagctccagagagaagtcgaggaagagagagacggggtcagagagagcgcgcgggcgtgcgagcagcgaaagcgacaggggcaaagtgagtgacctgcttttgggggtgaccgccggagcgcggcgtgagccctcccccttgggatcccgcagctgaccagtcgcgctgacggacagacagacagacaccgcccccagccccagctaccacctcctccccggccggcggcggacagtggacgcggcggcgagccgcgggcaggggccggagcccgcgcccggaggcggggtggagggggtcggggctcgcggcgtcgcactgaaacttttcgtccaacttctgggctgttctcgcttcggaggagccgtggtccgcgcgggggaagccgagccgagcggagccgcgagaagtgctagctcgggccgggaggagccgcagccggaggagggggaggaggaagaagagaaggaagaggagagggggccgcagtggcgactcggcgctcggaagccgggctcatggacgggtgaggcggcggtgtgcgcagacagtgctccagccgcgcgcgctccccaggccctggcccgggcctcgggccggggaggaagagtagctcgccgaggcgccgaggagagcgggccgccccacagcccgagccggagagggagcgcgagccgcgccggccccggtcgggcctccgaaaccatgaactttctgctgtcttgggtgcattggagccttgccttgctgctctacctccaccatgccaagtggtcccaggctgcacccatggcagaaggaggagggcagaatcatcacgaagtggtgaagttcatggatgtctatcagcgcagctactgccatccaatcgagaccctggtggacatcttccaggagtaccctgatgagatcgagtacatcttcaagccatcctgtgtgcccctgatgcgatgcgggggctgctgcaatgacgagggcctggagtgtgtgcccactgaggagtccaacatcaccatgcagattatgcggatcaaacctcaccaaggccagcacataggagagatgagcttcctacagcacaacaaatgtgaatgcagaccaaagaaagatagagcaagacaagaaaaatgtgacaagccgaggcggtgagccgggcaggaggaaggagcctccctcagggtttcgggaaccagatctctcaccaggaaagactgatacagaacgatcgatacagaaaccacgctgccgccaccacaccatcaccatcgacagaacagtccttaatccagaaacctgaaatgaaggaagaggagactctgcgcagagcactttgggtccggagggcgagactccggcggaagcattcccgggcgggtgacccagcacggtccctcttggaattggattcgccattttatttttcttgctgctaaatcaccgagcccggaagattagagagttttatttctgggattcctgtagacacacccacccacatacatacatttatatatatatatattatatatatataaaaataaatatctctattttatatatataaaatatatatattctttttttaaattaacagtgctaatgttattggtgtcttcactggatgtatttgactgctgtggacttgagttgggaggggaatgttcccactcagatcctgacagggaagaggaggagatgagagactctggcatgatcttttttttgtcccacttggtggggccagggtcctctcccctgcccaggaatgtgcaaggccagggcatgggggcaaatatgacccagttttgggaacaccgacaaacccagccctggcgctgagcctctctaccccaggtcagacggacagaaagacagatcacaggtacagggatgaggacaccggctctgaccaggagtttggggagcttcaggacattgctgtgctttggggattccctccacatgctgcacgcgcatctcgcccccaggggcactgcctggaagattcaggagcctgggcggccttcgcttactctcacctgcttctgagttgcccaggagaccactggcagatgtcccggcgaagagaagagacacattgttggaagaagcagcccatgacagctccccttcctgggactcgccctcatcctcttcctgctccccttcctggggtgcagcctaaaaggacctatgtcctcacaccattgaaaccactagttctgtccccccaggagacctggttgtgtgtgtgtgagtggttgaccttcctccatcccctggtccttcccttcccttcccgaggcacagagagacagggcaggatccacgtgcccattgtggaggcagagaaaagagaaagtgttttatatacggtacttatttaatatccctttttaattagaaattaaaacagttaatttaattaaagagtagggttttttttcagtattcttggttaatatttaatttcaactatttatgagatgtatcttttgctctctcttgctctcttatttgtaccggtttttgtatataaaattcatgtttccaatctctctctccctgatcggtgacagtcactagcttatcttgaacagatatttaattttgctaacactcagctctgccctccccgatcccctggctccccagcacacattcctttgaaataaggtttcaatatacatctacatactatatatatatttggcaacttgtatttgtgtgtatatatatatatatatgtttatgtatatatgtgattctgataaaatagacattgctattctgttttttatatgtaaaaacaaaacaagaaaaaatagagaattctacatactaaatctctctccttttttaattttaatatttgttatcatttatttattggtgctactgtttatccgtaataattgtggggaaaagatattaacatcacgtctttgtctctagtgcagtttttcgagatattccgtagtacatatttatttttaaacaacgacaaagaaatacagatatatcttaaaaaaaaaaaagcattttgtattaaagaatttaattctgatctcaaaaaaaaaaaaa

SEQ ID NO: 159 - DNA, 3476 bp, Homo sapiens
ggcttggggcagccgggtagctcggaggtcgtggcgctgggggctagcaccagcgctctgtcgggaggcgcagcggttaggtggaccggtcagcggactcaccggccagggcgctcggtgctggaatttgatattcattgatccgggttttatccctcttcttttttcttaaacatttttttttaaaactgtattgtttctcgttttaatttatttttgcttgccattccccacttgaatcgggccgacggcttggggagattgctctacttccccaaatcactgtggattttggaaaccagcagaaagaggaaagaggtagcaagagctccagagagaagtcgaggaagagagagacggggtcagagagagcgcgcgggcgtgcgagcagcgaaagcgacaggggcaaagtgagtgacctgcttttgggggtgaccgccggagcgcggcgtgagccctcccccttgggatcccgcagctgaccagtcgcgctgacggacagacagacagacaccgcccccagccccagctaccacctcctccccggccggcggcggacagtggacgcggcggcgagccgcgggcaggggccggagcccgcgcccggaggcggggtggagggggtcggggctcgcggcgtcgcactgaaacttttcgtccaacttctgggctgttctcgcttcggaggagccgtggtccgcgcgggggaagccgagccgagcggagccgcgagaagtgctagctcgggccgggaggagccgcagccggaggagggggaggaggaagaagagaaggaagaggagagggggccgcagtggcgactcggcgctcggaagccgggctcatggacgggtgaggcggcggtgtgcgcagacagtgctccagccgcgcgcgctccccaggccctggcccgggcctcgggccggggaggaagagtagctcgccgaggcgccgaggagagcgggccgccccacagcccgagccggagagggagcgcgagccgcgccggccccggtcgggcctccgaaaccatgaactttctgctgtcttgggtgcattggagccttgccttgctgctctacctccaccatgccaagtggtcccaggctgcacccatggcagaaggaggagggcagaatcatcacgaagtggtgaagttcatggatgtctatcagcgcagctactgccatccaatcgagaccctggtggacatcttccaggagtaccctgatgagatcgagtacatcttcaagccatcctgtgtgcccctgatgcgatgcgggggctgctgcaatgacgagggcctggagtgtgtgcccactgaggagtccaacatcaccatgcagattatgcggatcaaacctcaccaaggccagcacataggagagatgagcttcctacagcacaacaaatgtgaatgcagaccaaagaaagatagagcaagacaagaaaatccctgtgggccttgctcagagcggagaaagcatttgtttgtacaagatccgcagacgtgtaaatgttcctgcaaaaacacagactcgcgttgcaaggcgaggcagcttgagttaaacgaacgtacttgcagatctctcaccaggaaagactgatacagaacgatcgatacagaaaccacgctgccgccaccacaccatcaccatcgacagaacagtccttaatccagaaacctgaaatgaaggaagaggagactctgcgcagagcactttgggtccggagggcgagactccggcggaagcattcccgggcgggtgacccagcacggtccctcttggaattggattcgccattttatttttcttgctgctaaatcaccgagcccggaagattagagagttttatttctgggattcctgtagacacacccacccacatacatacatttatatatatatatattatatatatataaaaataaatatctctattttatatatataaaatatatatattctttttttaaattaacagtgctaatgttattggtgtcttcactggatgtatttgactgctgtggacttgagttgggaggggaatgttcccactcagatcctgacagggaagaggaggagatgagagactctggcatgatcttttttttgtcccacttggtggggccagggtcctctcccctgcccaggaatgtgcaaggccagggcatgggggcaaatatgacccagttttgggaacaccgacaaacccagccctggcgctgagcctctctaccccaggtcagacggacagaaagacagatcacaggtacagggatgaggacaccggctctgaccaggagtttggggagcttcaggacattgctgtgctttggggattccctccacatgctgcacgcgcatctcgcccccaggggcactgcctggaagattcaggagcctgggcggccttcgcttactctcacctgcttctgagttgcccaggagaccactggcagatgtcccggcgaagagaagagacacattgttggaagaagcagcccatgacagctccccttcctgggactcgccctcatcctcttcctgctccccttcctggggtgcagcctaaaaggacctatgtcctcacaccattgaaaccactagttctgtccccccaggagacctggttgtgtgtgtgtgagtggttgaccttcctccatcccctggtccttcccttcccttcccgaggcacagagagacagggcaggatccacgtgcccattgtggaggcagagaaaagagaaagtgttttatatacggtacttatttaatatccctttttaattagaaattaaaacagttaatttaattaaagagtagggttttttttcagtattcttggttaatatttaatttcaactatttatgagatgtatcttttgctctctcttgctctcttatttgtaccggtttttgtatataaaattcatgtttccaatctctctctccctgatcggtgacagtcactagcttatcttgaacagatatttaattttgctaacactcagctctgccctccccgatcccctggctccccagcacacattcctttgaaataaggtttcaatatacatctacatactatatatatatttggcaacttgtatttgtgtgtatatatatatatatatgtttatgtatatatgtgattctgataaaatagacattgctattctgttttttatatgtaaaaacaaaacaagaaaaaatagagaattctacatactaaatctctctccttttttaattttaatatttgttatcatttatttattggtgctactgtttatccgtaataattgtggggaaaagatattaacatcacgtctttgtctctagtgcagtttttcgagatattccgtagtacatatttatttttaaacaacgacaaagaaatacagatatatcttaaaaaaaaaaaagcattttgtattaaagaatttaattctgatctcaaaaaaaaaaaaa

SEQ ID NO: 160 - DNA, 3614 bp, Homo sapiens
ggcttggggcagccgggtagctcggaggtcgtggcgctgggggctagcaccagcgctctgtcgggaggcgcagcggttaggtggaccggtcagcggactcaccggccagggcgctcggtgctggaatttgatattcattgatccgggttttatccctcttcttttttcttaaacatttttttttaaaactgtattgtttctcgttttaatttatttttgcttgccattccccacttgaatcgggccgacggcttggggagattgctctacttccccaaatcactgtggattttggaaaccagcagaaagaggaaagaggtagcaagagctccagagagaagtcgaggaagagagagacggggtcagagagagcgcgcgggcgtgcgagcagcgaaagcgacaggggcaaagtgagtgacctgcttttgggggtgaccgccggagcgcggcgtgagccctcccccttgggatcccgcagctgaccagtcgcgctgacggacagacagacagacaccgcccccagccccagctaccacctcctccccggccggcggcggacagtggacgcggcggcgagccgcgggcaggggccggagcccgcgcccggaggcggggtggagggggtcggggctcgcggcgtcgcactgaaacttttcgtccaacttctgggctgttctcgcttcggaggagccgtggtccgcgcgggggaagccgagccgagcggagccgcgagaagtgctagctcgggccgggaggagccgcagccggaggagggggaggaggaagaagagaaggaagaggagagggggccgcagtggcgactcggcgctcggaagccgggctcatggacgggtgaggcggcggtgtgcgcagacagtgctccagccgcgcgcgctccccaggccctggcccgggcctcgggccggggaggaagagtagctcgccgaggcgccgaggagagcgggccgccccacagcccgagccggagagggagcgcgagccgcgccggccccggtcgggcctccgaaaccatgaactttctgctgtcttgggtgcattggagccttgccttgctgctctacctccaccatgccaagtggtcccaggctgcacccatggcagaaggaggagggcagaatcatcacgaagtggtgaagttcatggatgtctatcagcgcagctactgccatccaatcgagaccctggtggacatcttccaggagtaccctgatgagatcgagtacatcttcaagccatcctgtgtgcccctgatgcgatgcgggggctgctgcaatgacgagggcctggagtgtgtgcccactgaggagtccaacatcaccatgcagattatgcggatcaaacctcaccaaggccagcacataggagagatgagcttcctacagcacaacaaatgtgaatgcagaccaaagaaagatagagcaagacaagaaaaaaaatcagttcgaggaaagggaaaggggcaaaaacgaaagcgcaagaaatcccggtataagtcctggagcgttccctgtgggccttgctcagagcggagaaagcatttgtttgtacaagatccgcagacgtgtaaatgttcctgcaaaaacacagactcgcgttgcaaggcgaggcagcttgagttaaacgaacgtacttgcagatgtgacaagccgaggcggtgagccgggcaggaggaaggagcctccctcagggtttcgggaaccagatctctcaccaggaaagactgatacagaacgatcgatacagaaaccacgctgccgccaccacaccatcaccatcgacagaacagtccttaatccagaaacctgaaatgaaggaagaggagactctgcgcagagcactttgggtccggagggcgagactccggcggaagcattcccgggcgggtgacccagcacggtccctcttggaattggattcgccattttatttttcttgctgctaaatcaccgagcccggaagattagagagttttatttctgggattcctgtagacacacccacccacatacatacatttatatatatatatattatatatatataaaaataaatatctctattttatatatataaaatatatatattctttttttaaattaacagtgctaatgttattggtgtcttcactggatgtatttgactgctgtggacttgagttgggaggggaatgttcccactcagatcctgacagggaagaggaggagatgagagactctggcatgatcttttttttgtcccacttggtggggccagggtcctctcccctgcccaggaatgtgcaaggccagggcatgggggcaaatatgacccagttttgggaacaccgacaaacccagccctggcgctgagcctctctaccccaggtcagacggacagaaagacagatcacaggtacagggatgaggacaccggctctgaccaggagtttggggagcttcaggacattgctgtgctttggggattccctccacatgctgcacgcgcatctcgcccccaggggcactgcctggaagattcaggagcctgggcggccttcgcttactctcacctgcttctgagttgcccaggagaccactggcagatgtcccggcgaagagaagagacacattgttggaagaagcagcccatgacagctccccttcctgggactcgccctcatcctcttcctgctccccttcctggggtgcagcctaaaaggacctatgtcctcacaccattgaaaccactagttctgtccccccaggagacctggttgtgtgtgtgtgagtggttgaccttcctccatcccctggtccttcccttcccttcccgaggcacagagagacagggcaggatccacgtgcccattgtggaggcagagaaaagagaaagtgttttatatacggtacttatttaatatccctttttaattagaaattaaaacagttaatttaattaaagagtagggttttttttcagtattcttggttaatatttaatttcaactatttatgagatgtatcttttgctctctcttgctctcttatttgtaccggtttttgtatataaaattcatgtttccaatctctctctccctgatcggtgacagtcactagcttatcttgaacagatatttaattttgctaacactcagctctgccctccccgatcccctggctccccagcacacattcctttgaaataaggtttcaatatacatctacatactatatatatatttggcaacttgtatttgtgtgtatatatatatatatatgtttatgtatatatgtgattctgataaaatagacattgctattctgttttttatatgtaaaaacaaaacaagaaaaaatagagaattctacatactaaatctctctccttttttaattttaatatttgttatcatttatttattggtgctactgtttatccgtaataattgtggggaaaagatattaacatcacgtctttgtctctagtgcagtttttcgagatattccgtagtacatatttatttttaaacaacgacaaagaaatacagatatatcttaaaaaaaaaaaagcattttgtattaaagaatttaattctgatctcaaaaaaaaaaaaa

SEQ ID NO: 161 - DNA, 2920 bp, Mus musculus
cgggattgcacggaaacttttcgtccaacttctgggctcttctcgctccgtagtagccgtggtctgcgccgcaggagacaaaccgatcggagctgggagaagtgctagctcgggcctggagaagccggggcccgagaagagaggggaggaagagaaggaagaggagagggggccgcagtgggcgctcggctctcaggagccgagctcatggacgggtgaggcggccgtgtgcgcagacagtgctccagccgcgcgcgcgccccaggccccggcccgggcctcggttccagaagggagaggagcccgccaaggcgcgcaagagagcgggctgcctcgcagtccgagccggagagggagcgcgagccgcgccggccccggacgggcctccgaaaccatgaactttctgctctcttgggtgcactggaccctggctttactgctgtacctccaccatgccaagtggtcccaggctgcacccacgacagaaggagagcagaagtcccatgaagtgatcaagttcatggatgtctaccagcgaagctactgccgtccgattgagaccctggtggacatcttccaggagtaccccgacgagatagagtacatcttcaagccgtcctgtgtgccgctgatgcgctgtgcaggctgctgtaacgatgaagccctggagtgcgtgcccacgtcagagagcaacatcaccatgcagatcatgcggatcaaacctcaccaaagccagcacataggagagatgagcttcctacagcacagcagatgtgaatgcagaccaaagaaagacagaacaaagccagaaaaaaaatcagttcgaggaaagggaaagggtcaaaaacgaaagcgcaagaaatcccggtttaaatcctggagcgttcactgtgagccttgttcagagcggagaaagcatttgtttgtccaagatccgcagacgtgtaaatgttcctgcaaaaacacagactcgcgttgcaaggcgaggcagcttgagttaaacgaacgtacttgcagatgtgacaagccaaggcggtgagccaggctgcaggaaggagcctccctcagggtttcgggaaccagacctctcaccggaaagaccgattaaccatgtcaccaccacgccatcatcgtcaccgttgacagaacagtccttaatccagaaagcctgacatgaaggaagaggagactcttcgaggagcactttgggtccggagggcgagactccggcagacgcattcccgggcaggtgaccaagcacggtccctcgtgggactggattcgccattttcttatatctgctgctaaatcgccaagcccggaagattagggttgtttctgggattcctgtagacacacccacccacatacacacatatatatatattatatatataaataaatatatatgttttatatataaaatatatatatattcttttttttaaattaactctgctaatgttattggtgtcttcactggatatgtttgactgctgtggacttgtgttgggaggaggatgtcctcactcggatgccgacacgggagacaatgggatgaaaggcttcagtgtggtctgagagaggccgaagtccttttgcctgccggggagcaagcaaggccagggcacgggggcacatttgctcacttccagaaacacgacaaacccattcctggccctgagtcaagaggacagagagacagatgatgacagagaaagagataaagatgccggttccaaccagaagtttggggagcctcaggacatggcatgctttgtggatccccatgatagtctacaaaagcaccccgcccctctgggcactgcctggaagaatcgggagcctggccagccttcagctcgctcctccacttctgaggggcctaggaggcctcccacaggtgtcccggcaagagaagacacggtggtggaagaagaggcctggtaatggcccctcctcctgggaccccttcgtcctctccttaccccacctcctgggtacagcccaggaggaccttgtgtgatcagaccattgaaaccactaattctgtccccaggagacttggctgtgtgtgtgagtggcttacccttcctcatcttcccttcccaaggcacagagcaatggggcaggacccgcaagcccctcacggaggcagagaaaagagaaagtgttttatatacggtacttatttaatagccctttttaattagaaattaaaacagttaatttaattaaagagtagggtttttttcagtattcttggttaatatttaatttcaactatttatgagatgtatctctcgctctctcttatttgtacttgtgtgtgtgtgtgtgtgtgtgtgtgtgtgtgtgtgtgtgtgtgtatgaaatctgtgtttccaatctctctctcccagatcggtgacagtcactagcttgtcctgagaagatatttaattttgctaacactcagctctgccctcccttgtccccaccacacattcctttgaaataaggtttcaatatacatttacatactatatatatatttggcaacttgtgtttgtatataaatatatatatatatatatatgtttatgtatatatgtgattctgataaaatagacattgctattctgttttttatatgtaaaaacaaaacaagaaaaatagagaattctacatactaaatctctctccttttttaattttaatatttgttatcatttatttattggtgctactgtttatccgtaataattgtgggggaaaaagatattaacatcacgtctttgtctctagagcagttttccgagatattccgtagtacatatttatttttaaacagcaacaaagaaatacagatatatcttaaaaaaaaaagcattttgtattaaagaattgaattctgatctcaaaaaaaaaaaaaaaaaaa

SEQ ID NO: 162 - DNA, 2716 bp, Mus musculus
cgggattgcacggaaacttttcgtccaacttctgggctcttctcgctccgtagtagccgtggtctgcgccgcaggagacaaaccgatcggagctgggagaagtgctagctcgggcctggagaagccggggcccgagaagagaggggaggaagagaaggaagaggagagggggccgcagtgggcgctcggctctcaggagccgagctcatggacgggtgaggcggccgtgtgcgcagacagtgctccagccgcgcgcgcgccccaggccccggcccgggcctcggttccagaagggagaggagcccgccaaggcgcgcaagagagcgggctgcctcgcagtccgagccggagagggagcgcgagccgcgccggccccggacgggcctccgaaaccatgaactttctgctctcttgggtgcactggaccctggctttactgctgtacctccaccatgccaagtggtcccaggctgcacccacgacagaaggagagcagaagtcccatgaagtgatcaagttcatggatgtctaccagcgaagctactgccgtccgattgagaccctggtggacatcttccaggagtaccccgacgagatagagtacatcttcaagccgtcctgtgtgccgctgatgcgctgtgcaggctgctgtaacgatgaagccctggagtgcgtgcccacgtcagagagcaacatcaccatgcagatcatgcggatcaaacctcaccaaagccagcacataggagagatgagcttcctacagcacagcagatgtgaatgcagaccaaagaaagacagaacaaagccagaaaaatgtgacaagccaaggcggtgagccaggctgcaggaaggagcctccctcagggtttcgggaaccagacctctcaccggaaagaccgattaaccatgtcaccaccacgccatcatcgtcaccgttgacagaacagtccttaatccagaaagcctgacatgaaggaagaggagactcttcgaggagcactttgggtccggagggcgagactccggcagacgcattcccgggcaggtgaccaagcacggtccctcgtgggactggattcgccattttcttatatctgctgctaaatcgccaagcccggaagattagggttgtttctgggattcctgtagacacacccacccacatacacacatatatatatattatatatataaataaatatatatgttttatatataaaatatatatatattcttttttttaaattaactctgctaatgttattggtgtcttcactggatatgtttgactgctgtggacttgtgttgggaggaggatgtcctcactcggatgccgacacgggagacaatgggatgaaaggcttcagtgtggtctgagagaggccgaagtccttttgcctgccggggagcaagcaaggccagggcacgggggcacatttgctcacttccagaaacacgacaaacccattcctggccctgagtcaagaggacagagagacagatgatgacagagaaagagataaagatgccggttccaaccagaagtttggggagcctcaggacatggcatgctttgtggatccccatgatagtctacaaaagcaccccgcccctctgggcactgcctggaagaatcgggagcctggccagccttcagctcgctcctccacttctgaggggcctaggaggcctcccacaggtgtcccggcaagagaagacacggtggtggaagaagaggcctggtaatggcccctcctcctgggaccccttcgtcctctccttaccccacctcctgggtacagcccaggaggaccttgtgtgatcagaccattgaaaccactaattctgtccccaggagacttggctgtgtgtgtgagtggcttacccttcctcatcttcccttcccaaggcacagagcaatggggcaggacccgcaagcccctcacggaggcagagaaaagagaaagtgttttatatacggtacttatttaatagccctttttaattagaaattaaaacagttaatttaattaaagagtagggtttttttcagtattcttggttaatatttaatttcaactatttatgagatgtatctctcgctctctcttatttgtacttgtgtgtgtgtgtgtgtgtgtgtgtgtgtgtgtgtgtgtgtgtgtatgaaatctgtgtttccaatctctctctcccagatcggtgacagtcactagcttgtcctgagaagatatttaattttgctaacactcagctctgccctcccttgtccccaccacacattcctttgaaataaggtttcaatatacatttacatactatatatatatttggcaacttgtgtttgtatataaatatatatatatatatatatgtttatgtatatatgtgattctgataaaatagacattgctattctgttttttatatgtaaaaacaaaacaagaaaaatagagaattctacatactaaatctctctccttttttaattttaatatttgttatcatttatttattggtgctactgtttatccgtaataattgtgggggaaaaagatattaacatcacgtctttgtctctagagcagttttccgagatattccgtagtacatatttatttttaaacagcaacaaagaaatacagatatatcttaaaaaaaaaagcattttgtattaaagaattgaattctgatctcaaaaaaaaaaaaaaaaaaa

SEQ ID NO: 163 - DNA, 2848 bp, Mus musculus
cgggattgcacggaaacttttcgtccaacttctgggctcttctcgctccgtagtagccgtggtctgcgccgcaggagacaaaccgatcggagctgggagaagtgctagctcgggcctggagaagccggggcccgagaagagaggggaggaagagaaggaagaggagagggggccgcagtgggcgctcggctctcaggagccgagctcatggacgggtgaggcggccgtgtgcgcagacagtgctccagccgcgcgcgcgccccaggccccggcccgggcctcggttccagaagggagaggagcccgccaaggcgcgcaagagagcgggctgcctcgcagtccgagccggagagggagcgcgagccgcgccggccccggacgggcctccgaaaccatgaactttctgctctcttgggtgcactggaccctggctttactgctgtacctccaccatgccaagtggtcccaggctgcacccacgacagaaggagagcagaagtcccatgaagtgatcaagttcatggatgtctaccagcgaagctactgccgtccgattgagaccctggtggacatcttccaggagtaccccgacgagatagagtacatcttcaagccgtcctgtgtgccgctgatgcgctgtgcaggctgctgtaacgatgaagccctggagtgcgtgcccacgtcagagagcaacatcaccatgcagatcatgcggatcaaacctcaccaaagccagcacataggagagatgagcttcctacagcacagcagatgtgaatgcagaccaaagaaagacagaacaaagccagaaaatcactgtgagccttgttcagagcggagaaagcatttgtttgtccaagatccgcagacgtgtaaatgttcctgcaaaaacacagactcgcgttgcaaggcgaggcagcttgagttaaacgaacgtacttgcagatgtgacaagccaaggcggtgagccaggctgcaggaaggagcctccctcagggtttcgggaaccagacctctcaccggaaagaccgattaaccatgtcaccaccacgccatcatcgtcaccgttgacagaacagtccttaatccagaaagcctgacatgaaggaagaggagactcttcgaggagcactttgggtccggagggcgagactccggcagacgcattcccgggcaggtgaccaagcacggtccctcgtgggactggattcgccattttcttatatctgctgctaaatcgccaagcccggaagattagggttgtttctgggattcctgtagacacacccacccacatacacacatatatatatattatatatataaataaatatatatgttttatatataaaatatatatatattcttttttttaaattaactctgctaatgttattggtgtcttcactggatatgtttgactgctgtggacttgtgttgggaggaggatgtcctcactcggatgccgacacgggagacaatgggatgaaaggcttcagtgtggtctgagagaggccgaagtccttttgcctgccggggagcaagcaaggccagggcacgggggcacatttgctcacttccagaaacacgacaaacccattcctggccctgagtcaagaggacagagagacagatgatgacagagaaagagataaagatgccggttccaaccagaagtttggggagcctcaggacatggcatgctttgtggatccccatgatagtctacaaaagcaccccgcccctctgggcactgcctggaagaatcgggagcctggccagccttcagctcgctcctccacttctgaggggcctaggaggcctcccacaggtgtcccggcaagagaagacacggtggtggaagaagaggcctggtaatggcccctcctcctgggaccccttcgtcctctccttaccccacctcctgggtacagcccaggaggaccttgtgtgatcagaccattgaaaccactaattctgtccccaggagacttggctgtgtgtgtgagtggcttacccttcctcatcttcccttcccaaggcacagagcaatggggcaggacccgcaagcccctcacggaggcagagaaaagagaaagtgttttatatacggtacttatttaatagccctttttaattagaaattaaaacagttaatttaattaaagagtagggtttttttcagtattcttggttaatatttaatttcaactatttatgagatgtatctctcgctctctcttatttgtacttgtgtgtgtgtgtgtgtgtgtgtgtgtgtgtgtgtgtgtgtgtgtatgaaatctgtgtttccaatctctctctcccagatcggtgacagtcactagcttgtcctgagaagatatttaattttgctaacactcagctctgccctcccttgtccccaccacacattcctttgaaataaggtttcaatatacatttacatactatatatatatttggcaacttgtgtttgtatataaatatatatatatatatatatgtttatgtatatatgtgattctgataaaatagacattgctattctgttttttatatgtaaaaacaaaacaagaaaaatagagaattctacatactaaatctctctccttttttaattttaatatttgttatcatttatttattggtgctactgtttatccgtaataattgtgggggaaaaagatattaacatcacgtctttgtctctagagcagttttccgagatattccgtagtacatatttatttttaaacagcaacaaagaaatacagatatatcttaaaaaaaaaagcattttgtattaaagaattgaattctgatctcaaaaaaaaaaaaaaaaaaa

SEQ ID NO: 164 - protein, 395 aa, Homo sapiens
MTDRQTDTAPSPSYHLLPGRRRTVDAAASRGQGPEPAPGGGVEGVGARGVALKLFVQLLGCSRFGGAVVRAGEAEPSGAARSASSGREEPQPEEGEEEEEKEEERGPQWRLGARKPGSWTGEAAVCADSAPAARAPQALARASGRGGRVARRGAEESGPPHSPSRRGSASRAGPGRASETMNFLLSWVHWSLALLLYLHHAKWSQAAPMAEGGGQNHHEVVKFMDVYQRSYCHPIETLVDIFQEYPDEIEYIFKPSCVPLMRCGGCCNDEGLECVPTEESNITMQIMRIKPHQGQHIGEMSFLQHNKCECRPKKDRARQEKKSVRGKGKGQKRKRKKSRYKSWSVPCGPCSERRKHLFVQDPQTCKCSCKNTDSRCKARQLELNERTCRCDKPRR

SEQ ID NO: 165 - protein, 412 aa, Homo sapiens
MTDRQTDTAPSPSYHLLPGRRRTVDAAASRGQGPEPAPGGGVEGVGARGVALKLFVQLLGCSRFGGAVVRAGEAEPSGAARSASSGREEPQPEEGEEEEEKEEERGPQWRLGARKPGSWTGEAAVCADSAPAARAPQALARASGRGGRVARRGAEESGPPHSPSRRGSASRAGPGRASETMNFLLSWVHWSLALLLYLHHAKWSQAAPMAEGGGQNHHEVVKFMDVYQRSYCHPIETLVDIFQEYPDEIEYIFKPSCVPLMRCGGCCNDEGLECVPTEESNITMQIMRIKPHQGQHIGEMSFLQHNKCECRPKKDRARQEKKSVRGKGKGQKRKRKKSRYKSWSVYVGARCCLMPWSLPGPHPCGPCSERRKHLFVQDPQTCKCSCKNTDSRCKARQLELNERTCRCDKPRR

SEQ ID NO: 166 - protein, 389 aa, Homo sapiens
MTDRQTDTAPSPSYHLLPGRRRTVDAAASRGQGPEPAPGGGVEGVGARGVALKLFVQLLGCSRFGGAVVRAGEAEPSGAARSASSGREEPQPEEGEEEEEKEEERGPQWRLGARKPGSWTGEAAVCADSAPAARAPQALARASGRGGRVARRGAEESGPPHSPSRRGSASRAGPGRASETMNFLLSWVHWSLALLLYLHHAKWSQAAPMAEGGGQNHHEVVKFMDVYQRSYCHPIETLVDIFQEYPDEIEYIFKPSCVPLMRCGGCCNDEGLECVPTEESNITMQIMRIKPHQGQHIGEMSFLQHNKCECRPKKDRARQEKKSVRGKGKGQKRKRKKSRPCGPCSERRKHLFVQDPQTCKCSCKNTDSRCKARQLELNERTCRCDKPRR

SEQ ID NO: 167 - protein, 371 aa, Homo sapiens
MTDRQTDTAPSPSYHLLPGRRRTVDAAASRGQGPEPAPGGGVEGVGARGVALKLFVQLLGCSRFGGAVVRAGEAEPSGAARSASSGREEPQPEEGEEEEEKEEERGPQWRLGARKPGSWTGEAAVCADSAPAARAPQALARASGRGGRVARRGAEESGPPHSPSRRGSASRAGPGRASETMNFLLSWVHWSLALLLYLHHAKWSQAAPMAEGGGQNHHEVVKFMDVYQRSYCHPIETLVDIFQEYPDEIEYIFKPSCVPLMRCGGCCNDEGLECVPTEESNITMQIMRIKPHQGQHIGEMSFLQHNKCECRPKKDRARQENPCGPCSERRKHLFVQDPQTCKCSCKNTDSRCKARQLELNERTCRCDKPRR

SEQ ID NO: 168 - protein, 354 aa, Homo sapiens
MTDRQTDTAPSPSYHLLPGRRRTVDAAASRGQGPEPAPGGGVEGVGARGVALKLFVQLLGCSRFGGAVVRAGEAEPSGAARSASSGREEPQPEEGEEEEEKEEERGPQWRLGARKPGSWTGEAAVCADSAPAARAPQALARASGRGGRVARRGAEESGPPHSPSRRGSASRAGPGRASETMNFLLSWVHWSLALLLYLHHAKWSQAAPMAEGGGQNHHEVVKFMDVYQRSYCHPIETLVDIFQEYPDEIEYIFKPSCVPLMRCGGCCNDEGLECVPTEESNITMQIMRIKPHQGQHIGEMSFLQHNKCECRPKKDRARQENPCGPCSERRKHLFVQDPQTCKCSCKNTDSRCKM

SEQ ID NO: 169 - protein, 327 aa, Homo sapiens
MTDRQTDTAPSPSYHLLPGRRRTVDAAASRGQGPEPAPGGGVEGVGARGVALKLFVQLLGCSRFGGAVVRAGEAEPSGAARSASSGREEPQPEEGEEEEEKEEERGPQWRLGARKPGSWTGEAAVCADSAPAARAPQALARASGRGGRVARRGAEESGPPHSPSRRGSASRAGPGRASETMNFLLSWVHWSLALLLYLHHAKWSQAAPMAEGGGQNHHEVVKFMDVYQRSYCHPIETLVDIFQEYPDEIEYIFKPSCVPLMRCGGCCNDEGLECVPTEESNITMQIMRIKPHQGQHIGEMSFLQHNKCECRPKKDRARQEKCDKPRR

SEQ ID NO: 170 - protein, 371 aa, Homo sapiens
MTDRQTDTAPSPSYHLLPGRRRTVDAAASRGQGPEPAPGGGVEGVGARGVALKLFVQLLGCSRFGGAVVRAGEAEPSGAARSASSGREEPQPEEGEEEEEKEEERGPQWRLGARKPGSWTGEAAVCADSAPAARAPQALARASGRGGRVARRGAEESGPPHSPSRRGSASRAGPGRASETMNFLLSWVHWSLALLLYLHHAKWSQAAPMAEGGGQNHHEVVKFMDVYQRSYCHPIETLVDIFQEYPDEIEYIFKPSCVPLMRCGGCCNDEGLECVPTEESNITMQIMRIKPHQGQHIGEMSFLQHNKCECRPKKDRARQENPCGPCSERRKHLFVQDPQTCKCSCKNTDSRCKARQLELNERTCRSLTRKD

SEQ ID NO: 171 - protein, 232 aa, Homo sapiens
MNFLLSWVHWSLALLLYLHHAKWSQAAPMAEGGGQNHHEVVKFMDVYQRSYCHPIETLVDIFQEYPDEIEYIFKPSCVPLMRCGGCCNDEGLECVPTEESNITMQIMRIKPHQGQHIGEMSFLQHNKCECRPKKDRARQEKKSVRGKGKGQKRKRKKSRYKSWSVYVGARCCLMPWSLPGPHPCGPCSERRKHLFVQDPQTCKCSCKNTDSRCKARQLELNERTCRCDKPRR

SEQ ID NO: 172 - protein, 148 aa, Homo sapiens
EGLTLDFGRTCLIQKLQRVALQSWVERGASHLLCRPPGSCVIASHAVVKFMDVYQRSYCHPIETLVDIFQEYPDEIEYIFKPSCVPLMRCGGCCNDEGLECVPTEESNITMQIMRIKPHQGQHIGEMSFLQHNKCECRPKKDRARQEK

SEQ ID NO: 173 - protein, 143 aa, Homo sapiens
MNFLLSWVHWSLALLLYLHHAKWSQAAPMAEGGGQNHHEVVKFMDVYQRSYCHPIETLVDIFQEYPDEIEYIFKPSCVPLMRCGGCCNDEGLECVPTEESNITMQVGIFGKWGKGGIGRGVTLWEQVVPGRFLARFALSGSCP

SEQ ID NO: 174 - protein, 41 aa, Homo sapiens [sequence omitted]

SEQ ID NO: 175 - protein, 73 aa, Homo sapiens
QPQLPPPPRPAADSGRGGEPRAGAGARARRRGGGGRGSRRRTETFRPTSGLFSLRRSRGPRGGSRAERSREKC

SEQ ID NO: 176 - protein, 22 aa, Homo sapiens
MNFLLSWVHWSLALLLYLHHAK

SEQ ID NO: 177 - protein, 214 aa, Mus musculus
MNFLLSWVHWTLALLLYLHHAKWSQAAPTTEGEQKSHEVIKFMDVYQRSYCRPIETLVDIFQEYPDEIEYIFKPSCVPLMRCAGCCNDEALECVPTSESNITMQIMRIKPHQSQHIGEMSFLQHSRCECRPKKDRTKPEKKSVRGKGKGQKRKRKKSRFKSWSVHCEPCSERRKHLFVQDPQTCKCSCKNTDSRCKARQLELNERTCRCDKPRR

SEQ ID NO: 178 - protein, 146 aa, Mus musculus
MNFLLSWVHWTLALLLYLHHAKWSQAAPTTEGEQKSHEVIKFMDVYQRSYCRPIETLVDIFQEYPDEIEYIFKPSCVPLMRCAGCCNDEALECVPTSESNITMQIMRIKPHQSQHIGEMSFLQHSRCECRPKKDRTKPEKCDKPRR

SEQ ID NO: 179 - protein, 190 aa, Mus musculus
MNFLLSWVHWTLALLLYLHHAKWSQAAPTTEGEQKSHEVIKFMDVYQRSYCRPIETLVDIFQEYPDEIEYIFKPSCVPLMRCAGCCNDEALECVPTSESNITMQIMRIKPHQSQHIGEMSFLQHSRCECRPKKDRTKPENHCEPCSERRKHLFVQDPQTCKCSCKNTDSRCKARQLELNERTCRCDKPRR

SEQ ID NO: 180 - protein, 214 aa, Mus musculus; identical to SEQ ID NO: 177

SEQ ID NO: 181 - protein, 81 aa, Mus musculus
MDVYQRSYCRPIETLVDIFQEYPDEIEYIFKPSCVPLMRCAGCCNDEALECVPTSESNITMQIMRIKPHQSQHIGEMSFLQ

SEQ ID NO: 182 - DNA, 776 bp, Homo sapiens
aaggacacgggcagcagacagtggtcagtcctttcttggctctgctgacactcgagcccacattccgtcacctgctcagaatcatgcaggtctccactgctgcccttgctgtcctcctctgcaccatggctctctgcaaccagttctctgcatcacttgctgctgacacgccgaccgcctgctgcttcagctacacctcccggcagattccacagaatttcatagctgactactttgagacgagcagccagtgctccaagcccggtgtcatcttcctaaccaagcgaagccggcaggtctgtgctgaccccagtgaggagtgggtccagaaatatgtcagcgacctagagctgagtgcctgaggggtccagaagcttcgaggcccagcgacctcggtgggccagtggggaggagcaggagcctgagccttgggaaacatgcgtgtgacctccacagctacctcttctatggactggttgttgccaaacagccacactgtgggactcttcttaacttaaattttaatttatttatactatttagtttttgtaatttattttcgatttcacagtgtgtttgtgattgtttgctctgagagttcccctgtcccctcccccttccctcacaccgcgtctggtgacaaccgagtggctgtcatcagcctgtgtaggcagtcatggcaccaaagccaccagactgacaaatgtgtatcggatgcttttgttcagggctgtgatcggcctggggaaataataaagcacgctcttttaaaaggt

SEQ ID NO: 183 - DNA, 764 bp, Mus musculus
agaaggatacaagcagcagcgagtaccagtcccttttctgttctgctgacaagctcaccctctgtcacctgctcaacatcatgaaggtctccaccactgcccttgctgttcttctctgtaccatgacactctgcaaccaagtcttctcagcgccatatggagctgacaccccgactgcctgctgcttctcctacagccggaagattccacgccaattcatcgttgactattttgaaaccagcagcctttgctcccagccaggtgtcattttcctgactaagagaaaccggcagatctgcgctgactccaaagagacctgggtccaagaatacatcactgacctggaactgaatgcctgagagtcttggaggcagcgaggaaccccccaaacctccatgggtcccctgtagagcaggggcttgagccgaacattcctgccacctgcatagctccatctcctataagctgtttgctgccaagtagccacatcgagggactcttcacttgaaattttatttaatttaatcctattggtttaatactatttaattttgtaatttattttattgtcatacttgtatttgtgactatttattctgaaagacttcaggacacgttcctcaacccccatctccctcccagttgttcacactgtttggtgacagctattctaggtagacatgatgacaaagtcatgaactgacaaatgtacaatagatgctttgtttataccagagaagtaataaatatgccctttaacaagt

SEQ ID NO: 184 - protein, 92 aa, Homo sapiens
MQVSTAALAVLLCTMALCNQFSASLAADTPTACCFSYTSRQIPQNFIADYFETSSQCSKPGVIFLTKRSRQVCADPSEEWVQKYVSDLELSA

SEQ ID NO: 185 - protein, 92 aa, Homo sapiens; identical to SEQ ID NO: 184

SEQ ID NO: 186 - protein, 80 aa, Homo sapiens
ALAVLLCTMALCNQFSASLAADTPTACCFSYTSRQIPQNFMADYFETSSQCSKPSVIFLTKRGRQVCADPSEEWVQKYVS

SEQ ID NO: 187 - protein, 92 aa, Mus musculus
MKVSTTALAVLLCTMTLCNQVFSAPYGADTPTACCFSYSRKIPRQFIVDYFETSSLCSQPGVIFLTKRNRQICADSKETWVQEYITDLELNA

SEQ ID NO: 188 - protein, 92 aa, Mus musculus; identical to SEQ ID NO: 187

SEQ ID NO: 189 - protein, 92 aa, Mus musculus; identical to SEQ ID NO: 187

SEQ ID NO: 190 - DNA, 1237 bp, Homo sapiens
gctgcagaggattcctgcagaggatcaagacagcacgtggacctcgcacagcctctcccacaggtaccatgaaggtctccgcggcagccctcgctgtcatcctcattgctactgccctctgcgctcctgcatctgcctccccatattcctcggacaccacaccctgctgctttgcctacattgcccgcccactgccccgtgcccacatcaaggagtatttctacaccagtggcaagtgctccaacccagcagtcgtctttgtcacccgaaagaaccgccaagtgtgtgccaacccagagaagaaatgggttcgggagtacatcaactctttggagatgagctaggatggagagtccttgaacctgaacttacacaaatttgcctgtttctgcttgctcttgtcctagcttgggaggcttcccctcactatcctaccccacccgctccttgaagggcccagattctaccacacagcagcagttacaaaaaccttccccaggctggacgtggtggctcacgcctgtaatcccagcactttgggaggccaaggtgggtggatcacttgaggtcaggagttcgagaccagcctggccaacatgatgaaaccccatctctactaaaaatacaaaaaattagccgggcgtggtagcgggcgcctgtagtcccagctactcgggaggctgaggcaggagaatggcgtgaacccgggaggcggagcttgcagtgagccgagatcgcgccactgcactccagcctgggcgacagagcgagactccgtctcaaaaaaaaaaaaaaaaaaaaaaatacaaaaattagccgggcgtggtggcccacgcctgtaatcccagctactcgggaggctaaggcaggaaaattgtttgaacccaggaggtggaggctgcagtgagctgagattgtgccacttcactccagcctgggtgacaaagtgagactccgtcacaacaacaacaacaaaaagcttccccaactaaagcctagaagagcttctgaggcgctgctttgtcaaaaggaagtctctaggttctgagctctggctttgccttggctttgccagggctctgtgaccaggaaggaagtcagcatgcctctagaggcaaggaggggaggaacactgcactcttaagcttccgccgtctcaacccctcacaggagcttactggcaaacatgaaaaatcggcttaccattaaagttctcaatgcaaccataaaaaaaaaa

SEQ ID NO: 191 - DNA, 523 bp, Mus musculus
ggcacgagtcgatctcccacagcctctgccgcgggtaccatgaagatctctgcagctgccctcaccatcatcctcactgcagccgccctctgcaccccggcacctgcctcaccatatggctcggacaccactccctgctgctttgcctacctctccctagagctgcctcgtgcccacgtcaaggagtatttctacaccagcagcaagtgctccaatcttgcagtcgtgtttgtcactcgaaggaaccgccaagtgtgtgccaacccagagaagaagtgggttcaagaatacatcaactatttggagatgagctaggatagagggtttcttgattctgaccctgtatacgcttccctgtcatcgcttgctctagtcctagccagcttggggatgccactccagtaatcccctactcccactccggtcctgggaaaatcggcatctccatccgctccgaccggctctcgaccacgaaacccaagaaatcagcatttcattaaaatttccatgatgcaacggacaa

SEQ ID NO: 192 - protein, 91 aa, Homo sapiens
MKVSAAALAVILIATALCAPASASPYSSDTTPCCFAYIARPLPRAHIKEYFYTSGKCSNPAVVFVTRKNRQVCANPEKKWVREYINSLEMS

SEQ ID NO: 193 - protein, 91 aa, Homo sapiens; identical to SEQ ID NO: 192

SEQ ID NO: 194 - protein, 19 aa, Homo sapiens
MKVSAAALAVILIATALCA

SEQ ID NO: 195 - protein, 91 aa, Mus musculus
MKISAAALTIILTAAALCTPAPASPYGSDTTPCCFAYLSLELPRAHVKEYFYTSSKCSNLAVVFVTRRNRQVCANPEKKWVQEYINYLEMS

SEQ ID NO: 196 - protein, 91 aa, Mus musculus
MKISAAALTIILTAAALCTPAPASPYGSDTTPCCFAYLSLALPRAHVKEYFYTSSKCSNLAVVFVTRRNRQVCANPEKKWVQEYINYLEMS

SEQ ID NO: 197 - protein, 91 aa, Mus musculus; identical to SEQ ID NO: 196

SEQ ID NO: 198 - DNA, 1125 bp, Homo sapiens
ttctgccctcgagcccaccgggaacgaaagagaagctctatctcgcctccaggagcccagctatgaactccttctccacaagcgccttcggtccagttgccttctccctggggctgctcctggtgttgcctgctgccttccctgccccagtacccccaggagaagattccaaagatgtagccgccccacacagacagccactcacctcttcagaacgaattgacaaacaaattcggtacatcctcgacggcatctcagccctgagaaaggagacatgtaacaagagtaacatgtgtgaaagcagcaaagaggcactggcagaaaacaacctgaaccttccaaagatggctgaaaaagatggatgcttccaatctggattcaatgaggagacttgcctggtgaaaatcatcactggtcttttggagtttgaggtatacctagagtacctccagaacagatttgagagtagtgaggaacaagccagagctgtgcagatgagtacaaaagtcctgatccagttcctgcagaaaaaggcaaagaatctagatgcaataaccacccctgacccaaccacaaatgccagcctgctgacgaagctgcaggcacagaaccagtggctgcaggacatgacaactcatctcattctgcgcagctttaaggagttcctgcagtccagcctgagggctcttcggcaaatgtagcatgggcacctcagattgttgttgttaatgggcattccttcttctggtcagaaacctgtccactgggcacagaacttatgttgttctctatggagaactaaaagtatgagcgttaggacactattttaattatttttaatttattaatatttaaatatgtgaagctgagttaatttatgtaagtcatatttatatttttaagaagtaccacttgaaacattttatgtattagttttgaaataataatggaaagtggctatgcagtttgaatatcctttgtttcagagccagatcatttcttggaaagtgtaggcttacctcaaataaatggctaacttatacatatttttaaagaaatatttatattgtatttatataatgtataaatggtttttataccaataaatggcattttaaaaaattc

SEQ ID NO: 199 - DNA, 1087 bp, Mus musculus
ccaagaacgatagtcaattccagaaaccgctatgaagttcctctctgcaagagacttccatccagttgccttcttgggactgatgctggtgacaaccacggccttccctacttcacaagtccggagaggagacttcacagaggataccactcccaacagacctgtctataccacttcacaagtcggaggcttaattacacatgttctctgggaaatcgtggaaatgagaaaagagttgtgcaatggcaattctgattgtatgaacaacgatgatgcacttgcagaaaacaatctgaaacttccagagatacaaagaaatgatggatgctaccaaactggatataatcaggaaatttgcctattgaaaatttcctctggtcttctggagtaccatagctacctggagtacatgaagaacaacttaaaagataacaagaaagacaaagccagagtccttcagagagatacagaaactctaattcatatcttcaaccaagaggtaaaagatttacataaaatagtccttcctaccccaatttccaatgctctcctaacagataagctggagtcacagaaggagtggctaaggaccaagaccatccaattcatcttgaaatcacttgaagaatttctaaaagtcactttgagatctactcggcaaacctagtgcgttatgcctaagcatatcagtttgtggacattcctcactgtggtcagaaaatatatcctgttgtcaggtatctgacttatgttgttctctacgaagaactgacaatatgaatgttgggacactattttaattatttttaatttattgataatttaaataagtaaactttaagttaatttatgattgatatttattatttttatgaagtgtcacttgaaatgttatatgttatagttttgaaatgataacctaaaaatctatttgatataaatattctgttacctagccagatggtttcttggaatgtataagtttacctcaatgaattgctaatttaaatatgtttttaaagaaatctttgtgatgtatttttataatgtttagactgtcttcaaacaaataaattatattatattt

SEQ ID NO: 200 - protein, 212 aa, Homo sapiens
MNSFSTSAFGPVAFSLGLLLVLPAAFPAPVPPGEDSKDVAAPHRQPLTSSERIDKQIRYILDGISALRKETCNKSNMCESSKEALAENNLNLPKMAEKDGCFQSGFNEETCLVKIITGLLEFEVYLEYLQNRFESSEEQARAVQMSTKVLIQFLQKKAKNLDAITTPDPTTNASLLTKLQAQNQWLQDMTTHLILRSFKEFLQSSLRALRQM

SEQ ID NO: 201 - protein, 212 aa, Homo sapiens; identical to SEQ ID NO: 200

SEQ ID NO: 202 - protein, 212 aa, Homo sapiens; identical to SEQ ID NO: 200

SEQ ID NO: 203 - protein, 51 aa, Homo sapiens
MGPRSPGALKLLKPTWFRAERGRILLTSLLGMSKEDLVASCRVCVYRSLSL

SEQ ID NO: 204 - protein, 211 aa, Mus musculus
MKFLSARDFHPVAFLGLMLVTTTAFPTSQVRRGDFTEDTTPNRPVYTTSQVGGLITHVLWEIVEMRKELCNGNSDCMNNDDALAENNLKLPEIQRNDGCYQTGYNQEICLLKISSGLLEYHSYLEYMKNNLKDNKKDKARVLQRDTETLIHIFNQEVKDLHKIVLPTPISNALLTDKLESQKEWLRTKTIQFILKSLEEFLKVTLRSTRQT

SEQ ID NO: 205 - protein, 211 aa, Mus musculus; identical to SEQ ID NO: 204

SEQ ID NO: 206 - DNA, 1666 bp, Homo sapiens
ctccataaggcacaaactttcagagacagcagagcacacaagcttctaggacaagagccaggaagaaaccaccggaaggaaccatctcactgtgtgtaaacatgacttccaagctggccgtggctctcttggcagccttcctgatttctgcagctctgtgtgaaggtgcagttttgccaaggagtgctaaagaacttagatgtcagtgcataaagacatactccaaacctttccaccccaaatttatcaaagaactgagagtgattgagagtggaccacactgcgccaacacagaaattattgtaaagctttctgatggaagagagctctgtctggaccccaaggaaaactgggtgcagagggttgtggagaagtttttgaagagggctgagaattcataaaaaaattcattctctgtggtatccaagaatcagtgaagatgccagtgaaacttcaagcaaatctacttcaacacttcatgtattgtgtgggtctgttgtagggttgccagatgcaatacaagattcctggttaaatttgaatttcagtaaacaatgaatagtttttcattgtaccatgaaatatccagaacatacttatatgtaaagtattatttatttgaatctacaaaaaacaacaaataatttttaaatataaggattttcctagatattgcacgggagaatatacaaatagcaaaattgaggccaagggccaagagaatatccgaactttaatttcaggaattgaatgggtttgctagaatgtgatatttgaagcatcacataaaaatgatgggacaataaattttgccataaagtcaaatttagctggaaatcctggatttttttctgttaaatctggcaaccctagtctgctagccaggatccacaagtccttgttccactgtgccttggtttctcctttatttctaagtggaaaaagtattagccaccatcttacctcacagtgatgttgtgaggacatgtggaagcactttaagttttttcatcataacataaattattttcaagtgtaacttattaacctatttattatttatgtatttatttaagcatcaaatatttgtgcaagaatttggaaaaatagaagatgaatcattgattgaatagttataaagatgttatagtaaatttattttattttagatattaaatgatgttttattagataaatttcaatcagggtttttagattaaacaaacaaacaattgggtacccagttaaattttcatttcagataaacaacaaataattttttagtataagtacattattgtttatctgaaattttaattgaactaacaatcctagtttgatactcccagtcttgtcattgccagctgtgttggtagtgctgtgttgaattacggaataatgagttagaactattaaaacagccaaaactccacagtcaatattagtaatttcttgctggttgaaacttgtttattatgtacaaatagattcttataatattatttaaatgactgcatttttaaatacaaggctttatatttttaactttaagatgtttttatgtgctctccaaattttttttactgtttctgattgtatggaaatataaaagtaaatatgaaacatttaaaatataatttgttgtcaaagtaaaaaaaaaaaaaaa

SEQ ID NO: 207 - protein, 99 aa, Homo sapiens
MTSKLAVALLAAFLISAALCEGAVLPRSAKELRCQCIKTYSKPFHPKFIKELRVIESGPHCANTEIIVKLSDGRELCLDPKENWVQRVVEKFLKRAENS

SEQ ID NO: 208 - protein, 99 aa, Homo sapiens; identical to SEQ ID NO: 207

SEQ ID NO: 209 - DNA, 2986 bp, Homo sapiens
gcgccccagtcgacgctgagctcctctgctactcagagttgcaacctcagcctcgctatggctcccagcagcccccggcccgcgctgcccgcactcctggtcctgctcggggctctgttcccaggacctggcaatgcccagacatctgtgtccccctcaaaagtcatcctgccccggggaggctccgtgctggtgacatgcagcacctcctgtgaccagcccaagttgttgggcatagagaccccgttgcctaaaaaggagttgctcctgcctgggaacaaccggaaggtgtatgaactgagcaatgtgcaagaagatagccaaccaatgtgctattcaaactgccctgatgggcagtcaacagctaaaaccttcctcaccgtgtactggactccagaacgggtggaactggcacccctcccctcttggcagccagtgggcaagaaccttaccctacgctgccaggtggagggtggggcaccccgggccaacctcaccgtggtgctgctccgtggggagaaggagctgaaacgggagccagctgtgggggagcccgctgaggtcacgaccacggtgctggtgaggagagatcaccatggagccaatttctcgtgccgcactgaactggacctgcggccccaagggctggagctgtttgagaacacctcggccccctaccagctccagacctttgtcctgccagcgactcccccacaacttgtcagcccccgggtcctagaggtggacacgcaggggaccgtggtctgttccctggacgggctgttcccagtctcggaggcccaggtccacctggcactgggggaccagaggttgaaccccacagtcacctatggcaacgactccttctcggccaaggcctcagtcagtgtgaccgcagaggacgagggcacccagcggctgacgtgtgcagtaatactggggaaccagagccaggagacactgcagacagtgaccatctacagctttccggcgcccaacgtgattctgacgaagccagaggtctcagaagggaccgaggtgacagtgaagtgtgaggcccaccctagagccaaggtgacgctgaatggggttccagcccagccactgggcccgagggcccagctcctgctgaaggccaccccagaggacaacgggcgcagcttctcctgctctgcaaccctggaggtggccggccagcttatacacaagaaccagacccgggagcttcgtgtcctgtatggcccccgactggacgagagggattgtccgggaaactggacgtggccagaaaattcccagcagactccaatgtgccaggcttgggggaacccattgcccgagctcaagtgtctaaaggatggcactttcccactgcccatcggggaatcagtgactgtcactcgagatcttgagggcacctacctctgtcgggccaggagcactcaaggggaggtcacccgcgaggtgaccgtgaatgtgctctccccccggtatgagattgtcatcatcactgtggtagcagccgcagtcataatgggcactgcaggcctcagcacgtacctctataaccgccagcggaagatcaagaaatacagactacaacaggcccaaaaagggacccccatgaaaccgaacacacaagccacgcctccctgaacctatcccgggacagggcctcttcctcggccttcccatattggtggcagtggtgccacactgaacagagtggaagacatatgccatgcagctacacctaccggccctgggacgccggaggacagggcattgtcctcagtcagatacaacagcatttggggccatggtacctgcacacctaaaacactaggccacgcatctgatctgtagtcacatgactaagccaagaggaaggagcaagactcaagacatgattgatggatgttaaagtctagcctgatgagaggggaagtggtgggggagacatagccccaccatgaggacatacaactgggaaatactgaaacttgctgcctattgggtatgctgaggcccacagacttacagaagaagtggccctccatagacatgtgtagcatcaaaacacaaaggcccacacttcctgacggatgccagcttgggcactgctgtctactgaccccaacccttgatgatatgtatttattcatttgttattttaccagctatttattgagtgtcttttatgtaggctaaatgaacataggtctctggcctcacggagctcccagtccatgtcacattcaaggtcaccaggtacagttgtacaggttgtacactgcaggagagtgcctggcaaaaagatcaaatggggctgggacttctcattggccaacctgcctttccccagaaggagtgatttttctatcggcacaaaagcactatatggactggtaatggttcacaggttcagagattacccagtgaggccttattcctcccttccccccaaaactgacacctttgttagccacctccccacccacatacatttctgccagtgttcacaatgacactcagcggtcatgtctggacatgagtgcccagggaatatgcccaagctatgccttgtcctcttgtcctgtttgcatttcactgggagcttgcactattgcagctccagtttcctgcagtgatcagggtcctgcaagcagtggggaagggggccaaggtattggaggactccctcccagctttggaagggtcatccgcgtgtgtgtgtgtgtgtatgtgtagacaagctctcgctctgtcacccaggctggagtgcagtggtgcaatcatggttcactgcagtcttgaccttttgggctcaagtgatcctcccacctcagcctcctgagtagctgggaccataggctcacaacaccacacctggcaaatttgattttttttttttttttcagagacggggtctcgcaacattgcccagacttcctttgtgttagttaataaagctttctcaactgcc

SEQ ID NO: 210 - DNA, 2540 bp, Mus musculus
gcgccgcccgcctcagtctgcacccagtgctagtgctgagctccgctgctacctgcactttgccctggccctgcaatggcttcaacccgtgccaagcccacgctacctctgctcctggccctggtcaccgttgtgatccctgggcctggtgatgctcaggtatccatccatcccagagaagccttcctgccccagggtgggtccgtgcaggtgaactgttcttcctcatgcaaggaggacctcagcctgggcttggagactcagtggctgaaagatgagctcgagagtggacccaactggaagctgtttgagctgagcgagatcggggaggacagcagtccgctgtgctttgagaactgtggcaccgtgcagtcgtccgcttccgctaccatcaccgtgtattcgtttccggagagtgtggagctgagacctctgccagcctggcagcaagtaggcaaggacctcaccctgcgctgccacgtggatggtggagcaccgcggacccagctctcagcagtgctgctccgtggggaggagatactgagccgccagccagtgggtgggcaccccaaggaccccaaggagatcacattcacggtgctggctagcagaggggaccacggagccaatttctcatgccgcacagaactggatctcaggccgcaagggctggcattgttctctaatgtctccgaggccaggagcctccggactttcgatcttccagctaccatcccaaagctcgacacccctgacctcctggaggtgggcacccagcagaagttgttttgctccctggaaggcctgtttcctgcctctgaagctcggatatacctggagctgggaggccagatgccgacccaggagagcacaaacagcagtgactctgtgtcagccactgccttggtagaggtgactgaggagttcgacagaaccctgccgctgcgctgcgttttggagctagcggaccagatcctggagacgcagaggaccttaacagtctacaacttttcagctccggtcctgaccctgagccagctggaggtctcggaagggagccaagtaactgtgaagtgtgaagcccacagtgggtcgaaggtggttcttctgagcggcgtcgagcctaggccacccaccccgcaggtccaattcacactgaatgccagctcggaggatcacaaacgaagcttcttttgctctgccgctctggaggtggcgggaaagttcctgtttaaaaaccagaccctggaactgcacgtgctgtatggtcctcggctggacgagacggactgcttggggaactggacctggcaagaggggtctcagcagactctgaaatgccaggcctgggggaacccatctcctaagatgacctgcagacggaaggcagatggtgccctgctgcccatcggggtggtgaagtctgtcaaacaggagatgaatggtacatacgtgtgccatgcctttagctcccatgggaatgtcaccaggaatgtgtacctgacagtactgtaccactctcaaaataactggactataatcattctggtgccagtactgctggtcattgtgggcctcgtgatggcagcctcttatgtttataaccgccagagaaagatcaggatatacaagttacagaaggctcaggaggaggccataaaactcaagggacaagccccacctccctgagcctgctggatgagactcctgcctggaccccctgcagggcaacagctgctgctgcttttgaacagaatggtagacagcatttaccctcagccacttcctctggctgtcacagaacaggatggtggcctgggggatgcacacttgtagcctcagagctaagaggactcggtggatggagcaagactgtgaacacgtgtgacccggacccacctacagcccggtggaccttcagccaagaaacgctgacttcattctctattgcccctgctgaggggctcctgcctaaggaagacatgatatccagtagacacaagcaagaagaccacacttccccccgacacaggaaagctgagacattgtccccaactcttcttgatgtatttattaatttagagttttaccagctatttattgagtaccctgtatatagtagatcagtgaggaggtgaatgtataagttatggcctggaccctgctgcagatgctgtgagagtctggggaaagatcacatgggtcgagggtttctctactggtcaggatgcttttctcataagggtcgacttttttcaccagtcacataaacactatgtggactggcagtggttctctgctcctccacatcctggagcgtcccagcacctccccacctacttttgttcccaatgtcagccaccatgccttagcagctgaacaatcgagcctcatgctcatgaaatcatggtcccaggcggctccacctcaaagagaaagcctggaaggaaatgttccaactccttagaagggtcgtgcaagctgctgtgggagggtaagcacccctcccagcacagaaacctttcctttgaatcaataaa

SEQ ID NO: 211 - protein, 532 aa, Homo sapiens
MAPSSPRPALPALLVLLGALFPGPGNAQTSVSPSKVILPRGGSVLVTCSTSCDQPKLLGIETPLPKKELLLPGNNRKVYELSNVQEDSQPMCYSNCPDGQSTAKTFLTVYWTPERVELAPLPSWQPVGKNLTLRCQVEGGAPRANLTVVLLRGEKELKREPAVGEPAEVTTTVLVRRDHHGANFSCRTELDLRPQGLELFENTSAPYQLQTFVLPATPPQLVSPRVLEVDTQGTVVCSLDGLFPVSEAQVHLALGDQRLNPTVTYGNDSFSAKASVSVTAEDEGTQRLTCAVILGNQSQETLQTVTIYSFPAPNVILTKPEVSEGTEVTVKCEAHPRAKVTLNGVPAQPLGPRAQLLLKATPEDNGRSFSCSATLEVAGQLIHKNQTRELRVLYGPRLDERDCPGNWTWPENSQQTPMCQAWGNPLPELKCLKDGTFPLPIGESVTVTRDLEGTYLCRARSTQGEVTREVTVNVLSPRYEIVIITVVAAAVIMGTAGLSTYLYNRQRKIKKYRLQQAQKGTPMKPNTQATPP

SEQ ID NO: 212 - protein, 89 aa, Homo sapiens
GPGNAQTSVSPSKVILPRGGSVLVTCSTSCDQPMLLGIETPLPKKELLLPGNNRKVYELSNVQEDSQPMCYSNCPDGQSTAKTFLTVYW

SEQ ID NO: 213 - protein, 532 aa, Homo sapiens
MAPSSPRPALPALLVLLGALFPGPGNAQTSVSPSKVILPRGGSVLVTCSTSCDQPKLLGIETPLPKKELLLPGNNRKVYELSNVQEDSQPMCYSNCPDGQSTAKTFLTVYWTPERVELAPLPSWQPVGKNLTLRCQVEGGAPRANLTVVLLRGEKELKREPAVGEPAEVTTTVLVRRDHHGANFSCRTELDLRPQGLELFENTSAPYQLQTFVLPATPPQLVSPRVLEVDTQGTVVCSLDGLFPVSEAQVHLALGDQRLNPTVTYGNDSFSAKASVSVTAEDEGTQRLTCAVILGNQSQETLQTVTIYSFPAPNVILTKPEVSEGTEVTVKCEAHPRAKVTLNGVPAQPLGPRAQLLLKATPEDNGRSFSCSATLEVAGQLIHKNQTRELRVLYGPRLDERDCPGNWTWPENSQQTPMCQAWGNPLPELKCLKDGTFPLPIGESVTVTRDLEGTYLCRARSTQGEVTRKVTVNVLSPRYEIVIITVVAAAVIMGTAGLSTYLYNRQRKIKKYRLQQAQKGTPMKPNTQATPP

SEQ ID NO: 214 - protein, 43 aa, Homo sapiens
MAPSSPRPALPALLVLLGALFPGESGWGLPSGQFSEAREDRLP

SEQ ID NO: 215 - protein, 276 aa, Homo sapiens
  MOD_RES (97)..(98): Variable amino acid
  MOD_RES (108): Variable amino acid
  MOD_RES (111): Variable amino acid
QRLNPTVTYGNDSFSAKASVSVTAEDEGTQRLTCAVILGNQSQETLQTVTIYSFPAPNVILTKPEVSEGTEVTVKCEAHPRAKVTLNGVPAQPLGPXXQLLLKATPEXNGXSFSCSATLEVAGQLIHKNQTRELRVLYGPRLDERDCPGNWTWPENSQQTPMCQAWGNPLPELKCLKDGTFPLPIGESVTVTRDLEGTYLCRARSTQGEVTREVTVNVLSPRYEIVIITVVAAAVIMGTAGLSTYLYNRQRKIKKYRLQQAQKGTPMKPNTQATPP

SEQ ID NO: 216 - protein, 528 aa, Homo sapiens
SPRPALPALLVLFGALFPGPGNVQTSVSPSKVILPRGGSVLVTCSTSCDQPKLLGIETPLPKKELLLPGNNRKVYELSNVQEDSQPMCYSNCPDGQSTAKTFLTVYWTPERVELAPLPSWQPVGKNLTLRCQVEGGAPRANLTVVLLRGEKELKREPAVGEPAEVTTTVLVRRDHHGANFSCRTELDLRPQGLELFENTSAPYQLQTFVLPATPPQLVSPRVLEVDTQGTVVCSLDGLFPVSEAQVHLALGDQRLNPTVTYGNDSFSAKASVSVTAEDEGTQRLTCAVILGNQSQETLQTVTIYSFPAPNVILTKPEVSEGTEVTVKCEAHPRAKVTLNGVPAQPLGPRAQLLLKATPEDNGRSFSCSATLEVAGQLIHKNQTRELRVLYGPRLDERDCPGNWTWPENSQQTPMCQAWGNPLPELKCLKDGTFPLPIGESVTVTRDLEGTYLCRARSTQGEVTREVTVNVLSPRYEIVIITVVAAAVIMGTAGLSTYLYNRQRKIKKYRLQQAQKGTPMKPNTQATPP

SEQ ID NO: 217 - protein, 532 aa, Homo sapiens
  MOD_RES (241): Variable amino acid
MAPSSPRPALPALLVLLGALFPGPGNAQTSVSPSKVILPRGGSVLVTCSTSCDQPKLLGIETPLPKKELLLPGNNRKVYELSNVQEDSQPMCYSNCPDGQSTAKTFLTVYWTPERVELAPLPSWQPVGKNLTLRCQVEGGAPRANLTVVLLRGEKELKREPAVGEPAEVTTTVLVRRDHHGANFSCRTELDLRPQGLELFENTSAPYQLQTFVLPATPPQLVSPRVLEVDTQGTVVCSLDXLFPVSEAQVHLALGDQRLNPTVTYGNDSFSAKASVSVTAEDEGTQRLTCAVILGNQSQETLQTVTIYSFPAPNVILTKPEVSEGTEVTVKCEAHPRAKVTLNGVPAQPLGPRAQLLLKATPEDNGRSFSCSATLEVAGQLIHKNQTRELRVLYGPRLDERDCPGNWTWPENSQQTPMCQAWGNPLPELKCLKDGTFPLPIGESVTVTRDLEGTYLCRARSTQGEVTREVTVNVLSPRYEIVIITVVAAAVIMGTAGLSTYLYNRQRKIKKYRLQQAQKGTPMKPNTQATPP

SEQ ID NO: 218 - protein, 38 aa, Homo sapiens
ESVTVTRDLEGTYLCRARSTQGEVTREPPGMRLSSSLW

SEQ ID NO: 219 - protein, 537 aa, Mus musculus
MASTRAKPTLPLLLALVTVVIPGPGDAQVSIHPREAFLPQGGSVQVNCSSSCKEDLSLGLETQWLKDELESGPNWKLFELSEIGEDSSPLCFENCGTVQSSASATITVYSFPESVELRPLPAWQQVGKDLTLRCHVDGGAPRTQLSAVLLRGEEILSRQPVGGHPKDPKEITFTVLASRGDHGANFSCRTELDLRPQGLALFSNVSEARSLRTFDLPATIPKLDTPDLLEVGTQQKLFCSLEGLFPASEARIYLELGGQMPTQESTNSSDSVSATALVEVTEEFDRTLPLRCVLELADQILETQRTLTVYNFSAPVLTLSQLEVSEGSQVTVKCEAHSGSKVVLLSGVEPRPPTPQVQFTLNASSEDHKRSFFCSAALEVAGKFLFKNQTLELHVLYGPRLDETDCLGNWTWQEGSQQTLKCQAWGNPSPKMTCRRKADGALLPIGVVKSVKQEMNGTYVCHAFSSHGNVTRNVYLTVLYHSQNNWTIIILVPVLLVIVGLVMAASYVYNRQRKIRIYKLQKAQEEAIKLKGQAPPP

SEQ ID NO: 220 - protein, 360 aa, Mus musculus
MASTRAKPTLPLLLALVTVVIPGPGDAQVSIHPREAFLPQGGSVQVNCSSSCKEDLSLGLETQWLKDELESGPNWKLFELSEIGEDSSPLCFENCGTVQSSASATITVYSFPESVELRPLPAWQQVGKDLTLRCHVDGGAPRTQLSAVLLRGEEILSRQPVGGHPKDPKEITFTVLASRGDHGANFSCRTELDLRPQGLALFSNVSEARSLRTFDLPATIPKLDTPDLLEVGTQQKLFCSLEGLFPASEARIYLELGGQMPTQESTNSSDSVSATALVEVTEEFDRTLPLRCVLELADQILETQRTLTVYNFSAPVLTLSQLEVSEGSQVTVKCEAHSGSKVVLLSGVEPRPPTPQVQFT

SEQ ID NO: 221 - protein, 537 aa, Mus musculus; identical to SEQ ID NO: 219

SEQ ID NO: 222 - DNA, 931 bp, Homo sapiens
tttcgtcggcccgccccttggcttctgcactgatggtgggtggatgagtaatgcatccaggaagcctggaggcctgtggtttccgcacccgctgccacccccgcccctagcgtggacatttatcctctagcgctcaggccctgccgccatcgccgcagatccagcgcccagagagacaccagagaacccaccatggccccctttgagcccctggcttctggcatcctgttgttgctgtggctgatagcccccagcagggcctgcacctgtgtcccaccccacccacagacggccttctgcaattccgacctcgtcatcagggccaagttcgtggggacaccagaagtcaaccagaccaccttataccagcgttatgagatcaagatgaccaagatgtataaagggttccaagccttaggggatgccgctgacatccggttcgtctacacccccgccatggagagtgtctgcggatacttccacaggtcccacaaccgcagcgaggagtttctcattgctggaaaactgcaggatggactcttgcacatcactacctgcagttttgtggctccctggaacagcctgagcttagctcagcgccggggcttcaccaagacctacactgttggctgtgaggaatgcacagtgtttccctgtttatccatcccctgcaaactgcagagtggcactcattgcttgtggacggaccagctcctccaaggctctgaaaagggcttccagtcccgtcaccttgcctgcctgcctcgggagccagggctgtgcacctggcagtccctgcggtcccagatagcctgaatcctgcccggagtggaagctgaagcctgcacagtgtccaccctgttcccactcccatctttcttccggacaatgaaataaagagttaccacccagcagaaaaaaaaaaaaaaaa

SEQ ID NO: 223 - DNA, 624 bp, Mus musculus
atgatggccccctttgcatctctggcatctggcatcctcttgttgctatcactgatagcttccagtaaggcctgtagctgtgccccaccccacccacagacagccttctgcaactcggacctggtcataagggctaaattcatgggttccccacgaatcaacgagaccaccttataccagcgttataagatcaagatgatgactaagatgctaaaaggattcaaggctgtgggaaatgccgcagatatccggtacgcctacaccccagtcatggaaagcctctgtggatatgcccacaagtcccagaaccgcagtgaagagtttctcatcacgggccgcctaaggaacgggaaatttcacatcaatgcctgcagcttcttggttccctggcgtactctgagccctgctcagcaaagagttttctcaaaaaagaactatagtgctggctgtggggtgtgcacagtgtttccctgtttatctatcccttgcaaactggagagtgacactcactgtttgtggacggatcaggtcctcgtgggctctgaggactaccagagccgtcactttgcttgcctgccacggaatctaggcttgtgcacttggagatcccttggggcccgatga

SEQ ID NO: 224 - protein, 207 aa, Homo sapiens
MAPFEPLASGILLLLWLIAPSRACTCVPPHPQTAFCNSDLVIRAKFVGTPEVNQTTLYQRYEIKMTKMYKGFQALGDAADIRFVYTPAMESVCGYFHRSHNRSEEFLIAGKLQDGLLHITTCSFVAPWNSLSLAQRRGFTKTYTVGCEECTVFPCLSIPCKLQSGTHCLWTDQLLQGSEKGFQSRHLACLPREPGLCTWQSLRSQIA

SEQ ID NO: 225 - protein, 188 aa, Homo sapiens
MAPFEPLASGILLLLWLIAPSRACTCVPPHPQTAFCNSDLVIRAKFVGTPEVNQTTLYQRYESKMYKGFQALGDAADIRFVYTPAMESVCGYFHRSHNRSEEFLIAGKLQDGLLHITTCSFVAPWNSLSLAQRRGFTKTYTVGCEECTVFPCLSIPCKLQSGTHCLWTDQLLQGSEKGFQSRHLACLG

SEQ ID NO: 226 - protein, 143 aa, Homo sapiens
MTKMYKGFQALGDAADIRFVYTPAMESVCGYFHRSHNRSEEFLIAGKLQDGLLHITTCSFVAPWNSLSLAQRRGFTKTYTVGCEECTVFPCLSIPCKLQSGTHCLWTDQLLQGSEKGFQSRHLACLPREPGLCTWQSLRSQIA

SEQ ID NO: 227 - protein, 207 aa, Homo sapiens; identical to SEQ ID NO: 224

SEQ ID NO: 228 - protein, 207 aa, Homo sapiens; identical to SEQ ID NO: 224

SEQ ID NO: 229 - protein, 207 aa, Homo sapiens; identical to SEQ ID NO: 224

SEQ ID NO: 230 - protein, 207 aa, Homo sapiens; identical to SEQ ID NO: 224

SEQ ID NO: 231 - protein, 207 aa, Homo sapiens; identical to SEQ ID NO: 224

SEQ ID NO: 232 - protein, 207 aa, Mus musculus
MMAPFASLASGILLLLSLIASSKACSCAPPHPQTAFCNSDLVIRAKFMGSPRINETTLYQRYKIKMMTKMLKGFKAVGNAADIRYAYTPVMESLCGYAHKSQNRSEEFLITGRLRNGKFHINACSFLVPWRTLSPAQQRVFSKKNYSAGCGVCTVFPCLSIPCKLESDTHCLWTDQVLVGSEDYQSRHFACLPRNLGLCTWRSLGAR

SEQ ID NO: 233 - protein, 205 aa, Mus musculus
MMAPFASLASGILLLLSLIASSKACSCAPPHPQTAFCNSDLVIRAKFMGSPEINETTLYQRYKIKMTKMLKGFKAVGNAADIRYAYTPVMESLCGYAHKSQNRSEEFLITGRLRNGNLHISACSFLVPWRTLSPAQQRAFSKTYSAGCGVCTVFPCLSIPCKLESDTHCLWTDQVLVGSEDYQSRHFACLPRNPGLCTWRSLGAR

SEQ ID NO: 234 - protein, 48 aa, Mus musculus
MDIYSPLCSPCRHHRRSGLLETHQRYHDGPLCISGIWHPLVAITDSFQ

SEQ ID NO: 235 - DNA, 684 bp, Homo sapiens
cattcccagcctcacatcactcacaccttgcatttcacccctgcatcccagtcgccctgcagcctcacacagatcctgcacacacccagacagctggcgctcacacattcaccgttggcctgcctctgttcaccctccatggccctgctactggccctcagcctgctggttctctggacttccccagccccaactctgagtggcaccaatgatgctgaagactgctgcctgtctgtgacccagaaacccatccctgggtacatcgtgaggaacttccactaccttctcatcaaggatggctgcagggtgcctgctgtagtgttcaccacactgaggggccgccagctctgtgcacccccagaccagccctgggtagaacgcatcatccagagactgcagaggacctcagccaagatgaagcgccgcagcagttaacctatgaccgtgcagagggagcccggagtccgagtcaagcattgtgaattattacctaacctggggaaccgaggaccagaaggaaggaccaggcttccagctcctctgcaccagacctgaccagccaggacagggcctggggtgtgtgtgagtgtgagtgtgagcgagagggtgagtgtggtcagagtaaagctgctccacccccagattgcaatgctaccaataaagccgcctggtgtttacaactaa

SEQ ID NO: 236 - DNA, 720 bp, Mus musculus
gcgggctcactggggcacacacaagctcacttgcacttggctcctgaaccccttcacgccacaggaggacatctgagcgattccagtcactcccctgtgaacccgtcggagcctcggcctctcagattcttgcgcacacagtctctcaggctcactcactctctgtggcctgcctcagattatctgccatggccccccgtgtgaccccactcctggccttcagcctgctggttctctggaccttcccagccccaactctggggggtgctaatgatgcggaagactgctgcctgtctgtgacccagcgccccatccctgggaacatcgtgaaagccttccgctaccttcttaatgaagatggctgcagggtgcctgctgttgtgttcaccacactaaggggctatcagctctgtgcacctccagaccagccctgggtggatcgcatcatccgaagactgaagaagtcttctgccaagaacaaaggcaacagcaccagaaggagccctgtgtcttgagtaaagagatgtgaatcactctggcccaggaaaccaaggaccagaagagaggaccaggcctcctgatgctctgtcccagacctaacccagccaagtctgtgcctagagagtcgatgtgagtgtggacaagagagtttgtgtggctagaacaccatctctctgtggctagactgcagagcttccaataaagccgcttggtaccgtg

SEQ ID NO: 237 - protein, 98 aa, Homo sapiens
MALLLALSLLVLWTSPAPTLSGTNDAEDCCLSVTQKPIPGYIVRNFHYLLIKDGCRVPAVVFTTLRGRQLCAPPDQPWVERIIQRLQRTSAKMKRRSS

SEQ ID NO: 238 - protein, 98 aa, Homo sapiens; identical to SEQ ID NO: 237

SEQ ID NO: 239 - protein, 98 aa, Homo sapiens; identical to SEQ ID NO: 237

SEQ ID NO: 240 - protein, 108 aa, Mus musculus
MAPRVTPLLAFSLLVLWTFPAPTLGGANDAEDCCLSVTQRPIPGNIVKAFRYLLNEDGCRVPAVVFTTLRGYQLCAPPDQPWVDRIIRRLKKSSAKNKGNSTRRSPVS

SEQ ID NO: 241 - protein, 146 aa, Mus musculus
VHLSSEEKGLITSLWGKIDIEQTGGEALGRLLIVYPWTSRFFDHFGDLSSAKAVLGNAKVLAHGAKVLVSFGDAIKNLDNLKGTFAKLSELHCDKLHVDPENFKLLGNVLVICLAEHFGKDFTIDAQVAWQKLVAGVANALAHKYH

SEQ ID NO: 242 - protein, 108 aa, Mus musculus; identical to SEQ ID NO: 240

SEQ ID NO: 243 - DNA, 878 bp, Homo sapiens
atcccagcccacgcacagacccccaacttgcagctgcccacctcaccctcagctctggcctcttactcaccctctaccacagacatggctcagtcactggctctgagcctccttatcctggttctggcctttggcatccccaggacccaaggcagtgatggaggggctcaggactgttgcctcaagtacagccaaaggaagattcccgccaaggttgtccgcagctaccggaagcaggaaccaagcttaggctgctccatcccagctatcctgttcttgccccgcaagcgctctcaggcagagctatgtgcagacccaaaggagctctgggtgcagcagctgatgcagcatctggacaagacaccatccccacagaaaccagcccagggctgcaggaaggacaggggggcctccaagactggcaagaaaggaaagggctccaaaggctgcaagaggactgagcggtcacagacccctaaagggccatagcccagtgagcagcctggagccctggagaccccaccagcctcaccagcgcttgaagcctgaacccaagatgcaagaaggaggctatgctcaggggccctggagcagccaccccatgctggccttgccacactctttctcctgctttaaccaccccatctgcattcccagctctaccctgcatggctgagctgcccacagcaggccaggtccagagagaccgaggagggagagtctcccagggagcatgagaggaggcagcaggactgtccccttgaaggagaatcatcaggaccctggacctgatacggctccccagtacaccccacctcttccttgtaaatatgatttatacctaactgaataaaaagctgttctgtcttcccacccaa

SEQ ID NO: 244 - DNA, 831 bp, Mus musculus
tacagctctggtctcatcctcaactcaaccacaatcatggctcagatgatgactctgagcctccttagcctggtcctggctctctgcatcccctggacccaaggcagtgatggagggggacaggactgctgccttaagtacagccagaagaaaattccctacagtattgtccgaggctataggaagcaagaaccaagtttaggctgtcccatcccggcaatcctgttcttaccccggaagcactctaagcctgagctatgtgcaaaccctgaggaaggctgggtgcagaacctgatgcgccgcctggaccagcctccagccccagggaaacaaagccccggctgcaggaagaaccggggaacctctaagtctggaaagaaaggaaagggctccaagggctgcaagagaactgaacagacacagccctcaagaggatagcccagtagcccgcctggagcccaggagatcccccacgaacttcaagctgggtggttcacggtccaactcacaggcaaagagggagctagaaaacagactcaggagcccaaagcagccacctcatgctggcttccgtccacacccttgccctgcttcaaccattagatctgcacggccatccctttcttacctggcggagctgccttccctggggtagaccaagagagtcagaagaaagagtgtctcccagggaatgaggaaggagacagcaggactgtcccctctaggaggtcactcaggtcccaagacctgaacctgctctccatggcgccctccccttgtccttgcacctatgatttatacctaactgaataaaaaagtgatccagcctca

SEQ ID NO: 245 - protein, 134 aa, Homo sapiens
MAQSLALSLLILVLAFGIPRTQGSDGGAQDCCLKYSQRKIPAKVVRSYRKQEPSLGCSIPAILFLPRKRSQAELCADPKELWVQQLMQHLDKTPSPQKPAQGCRKDRGASKTGKKGKGSKGCKRTERSQTPKGP

SEQ ID NO: 246 - protein, 134 aa, Homo sapiens; identical to SEQ ID NO: 245

SEQ ID NO: 247 - protein, 124 aa, Homo sapiens
MAQSLALSLLILVLAFGIPRTQGSDGGAQDCCLKYSQRKIPAKVVRSYRKQEPSLGCSIPAILFLPRKRSQAELCADPKELWVQQLMQHLDKTPSPQKPAQGCRKDRGASKTGKKGKGSKGCKR

SEQ ID NO: 248 - protein, 134 aa, Homo sapiens; identical to SEQ ID NO: 245

SEQ ID NO: 249 - protein, 133 aa, Mus musculus
MAQMMTLSLLSLVLALCIPWTQGSDGGGQDCCLKYSQKKIPYSIVRGYRKQEPSLGCPIPAILFLPRKHSKPELCANPEEGWVQNLMRRLDQPPAPGKQSPGCRKNRGTSKSGKKGKGSKGCKRTEQTQPSRG

SEQ ID NO: 250 - DNA, 1518 bp, Homo sapiens
aaaacagcccggagcctgcagcccagccccacccagacccatggctggacctgccacccagagccccatgaagctgatggccctgcagctgctgctgtggcacagtgcactctggacagtgcaggaagccacccccctgggccctgccagctccctgccccagagcttcctgctcaagtgcttagagcaagtgaggaagatccagggcgatggcgcagcgctccaggagaagctggtgagtgagtgtgccacctacaagctgtgccaccccgaggagctggtgctgctcggacactctctgggcatcccctgggctcccctgagcagctgccccagccaggccctgcagctggcaggctgcttgagccaactccatagcggccttttcctctaccaggggctcctgcaggccctggaagggatctcccccgagttgggtcccaccttggacacactgcagctggacgtcgccgactttgccaccaccatctggcagcagatggaagaactgggaatggcccctgccctgcagcccacccagggtgccatgccggccttcgcctctgctttccagcgccgggcaggaggggtcctggttgcctcccatctgcagagcttcctggaggtgtcgtaccgcgttctacgccaccttgcccagccctgagccaagccctccccatcccatgtatttatctctatttaatatttatgtctatttaagcctcatatttaaagacagggaagagcagaacggagccccaggcctctgtgtccttccctgcatttctgagtttcattctcctgcctgtagcagtgagaaaaagctcctgtcctcccatcccctggactgggaggtagataggtaaataccaagtatttattactatgactgctccccagccctggctctgcaatgggcactgggatgagccgctgtgagcccctggtcctgagggtccccacctgggacccttgagagtatcaggtctcccacgtgggagacaagaaatccctgtttaatatttaaacagcagtgttccccatctgggtccttgcacccctcactctggcctcagccgactgcacagcggcccctgcatccccttggctgtgaggcccctggacaagcagaggtggccagagctgggaggcatggccctggggtcccacgaatttgctggggaatctcgtttttcttcttaagacttttgggacatggtttgactcccgaacatcaccgacgtgtctcctgtttttctgggtggcctcgggacacctgccctgcccccacgagggtcaggactgtgactctttttagggccaggcaggtgcctggacatttgccttgctggacggggactggggatgtgggagggagcagacaggaggaatcatgtcaggcctgtgtgtgaaaggaagctccactgtcaccctccacctcttcaccccccactcaccagtgtcccctccactgtcacattgtaactgaacttcaggataataaagtgtttgcctcca

SEQ ID NO: 251 - DNA, 1509 bp, Homo sapiens
aaaacagcccggagcctgcagcccagccccacccagacccatggctggacctgccacccagagccccatgaagctgatggccctgcagctgctgctgtggcacagtgcactctggacagtgcaggaagccacccccctgggccctgccagctccctgccccagagcttcctgctcaagtgcttagagcaagtgaggaagatccagggcgatggcgcagcgctccaggagaagctgtgtgccacctacaagctgtgccaccccgaggagctggtgctgctcggacactctctgggcatcccctgggctcccctgagcagctgccccagccaggccctgcagctggcaggctgcttgagccaactccatagcggccttttcctctaccaggggctcctgcaggccctggaagggatctcccccgagttgggtcccaccttggacacactgcagctggacgtcgccgactttgccaccaccatctggcagcagatggaagaactgggaatggcccctgccctgcagcccacccagggtgccatgccggccttcgcctctgctttccagcgccgggcaggaggggtcctggttgcctcccatctgcagagcttcctggaggtgtcgtaccgcgttctacgccaccttgcccagccctgagccaagccctccccatcccatgtatttatctctatttaatatttatgtctatttaagcctcatatttaaagacagggaagagcagaacggagccccaggcctctgtgtccttccctgcatttctgagtttcattctcctgcctgtagcagtgagaaaaagctcctgtcctcccatcccctggactgggaggtagataggtaaataccaagtatttattactatgactgctccccagccctggctctgcaatgggcactgggatgagccgctgtgagcccctggtcctgagggtccccacctgggacccttgagagtatcaggtctcccacgtgggagacaagaaatccctgtttaatatttaaacagcagtgttccccatctgggtccttgcacccctcactctggcctcagccgactgcacagcggcccctgcatccccttggctgtgaggcccctggacaagcagaggtggccagagctgggaggcatggccctggggtcccacgaatttgctggggaatctcgtttttcttcttaagacttttgggacatggtttgactcccgaacatcaccgacgtgtctcctgtttttctgggtggcctcgggacacctgccctgcccccacgagggtcaggactgtgactctttttagggccaggcaggtgcctggacatttgccttgctggacggggactggggatgtgggagggagcagacaggaggaatcatgtcaggcctgtgtgtgaaaggaagctccactgtcaccctccacctcttcaccccccactcaccagtgtcccctccactgtcacattgtaactgaacttcaggataataaagtgtttgcctcca

SEQ ID NO: 252 - DNA, 1703 bp, Homo sapiens
aaaacagcccggagcctgcagcccagccccacccagacccatggctggacctgccacccagagccccatgaagctgatgggtgagtgtcttggcccaggatgggagagccgcctgccctggcatgggagggaggctggtgtgacagaggggctggggatccccgttctgggaatggggattaaaggcacccagtgtccccgagagggcctcaggtggtagggaacagcatgtctcctgagcccgctctgtccccagccctgcagctgctgctgtggcacagtgcactctggacagtgcaggaagccacccccctgggccctgccagctccctgccccagagcttcctgctcaagtgcttagagcaagtgaggaagatccagggcgatggcgcagcgctccaggagaagctgtgtgccacctacaagctgtgccaccccgaggagctggtgctgctcggacactctctgggcatcccctgggctcccctgagcagctgccccagccaggccctgcagctggcaggctgcttgagccaactccatagcggccttttcctctaccaggggctcctgcaggccctggaagggatctcccccgagttgggtcccaccttggacacactgcagctggacgtcgccgactttgccaccaccatctggcagcagatggaagaactgggaatggcccctgccctgcagcccacccagggtgccatgccggccttcgcctctgctttccagcgccgggcaggaggggtcctggttgcctcccatctgcagagcttcctggaggtgtcgtaccgcgttctacgccaccttgcccagccctgagccaagccctccccatcccatgtatttatctctatttaatatttatgtctatttaagcctcatatttaaagacagggaagagcagaacggagccccaggcctctgtgtccttccctgcatttctgagtttcattctcctgcctgtagcagtgagaaaaagctcctgtcctcccatcccctggactgggaggtagataggtaaataccaagtatttattactatgactgctccccagccctggctctgcaatgggcactgggatgagccgctgtgagcccctggtcctgagggtccccacctgggacccttgagagtatcaggtctcccacgtgggagacaagaaatccctgtttaatatttaaacagcagtgttccccatctgggtccttgcacccctcactctggcctcagccgactgcacagcggcccctgcatccccttggctgtgaggcccctggacaagcagaggtggccagagctgggaggcatggccctggggtcccacgaatttgctggggaatctcgtttttcttcttaagacttttgggacatggtttgactcccgaacatcaccgacgtgtctcctgtttttctgggtggcctcgggacacctgccctgcccccacgagggtcaggactgtgactctttttagggccaggcaggtgcctggacatttgccttgctggacggggactggggatgtgggagggagcagacaggaggaatcatgtcaggcctgtgtgtgaaaggaagctccactgtcaccctccacctcttcaccccccactcaccagtgtcccctccactgtcacattgtaactgaacttcaggataataaagtgtttgcctccaaaaaaaaaaaaaaaaaaa

SEQ ID NO: 253 - DNA, 1363 bp, Mus musculus
gtataaaggccccctggagctgggccctggcagagcccagagctgcagcccagatcacccagaatccatggctcaactttctgcccagaggcgcatgaagctaatggccctgcagctgctgctgtggcaaagtgcactatggtcaggacgagaggccgttcccctggtcactgtcagcgctctgccaccatccctgcctctgccccgaagcttcctgcttaagtccctggagcaagtgaggaagatccaggccagcggctcggtgctgctggagcagttgtgtgccacctacaagctgtgtcaccccgaggagctggtgttgctgggccactctctggggatcccgaaggcttccctgagtggctgctctagccaggccctgcagcagacacagtgcctaagccagctccacagtgggctctgcctctaccaaggtctcctgcaggctctatcgggtatttcccctgccctggcccccaccttggacttgcttcagctggatgttgccaactttgccaccaccatctggcagcagatggaaaacctaggggtggcccctactgtgcagcccacacagagcgccatgccagccttcacttctgccttccagcgccgggcaggaggtgtcctggccatttcgtacctgcagggcttcctggagacggctcgccttgctctgcaccacttggcctagacctgagcagaaagccctttccagatagtttatttatctctatttaatatttatgcatatttaagcctactatttaaagacaaagacgagaaaatggagctctaagcttctagatcattctctccacttccgagttttgttctcctgcttagagcagagagagaaggctcttgtgtcctcctgtggaggccagggaaggagatgggtaaataccaagtattgattcctgctgctgctccaggcacccagttctgtggcagtacccccaaaaaatcagtgagccctgccgtgctgaggcaccatctcaggggggcccaggcagcatctggtctcccttccgggggacaagacatccctgtttaatatttaaacagcagtgttcccaaactgggttcttatatcccttgctctggtcaaccaggttgcagggtttcctgtcctcacaggaacgaagtccctaaagaaacagtggcagccaggtttagccccggaattgactggattccttttttagggccctgctggcctggaagttggagtggggggcagaggaggcaggaggaagcctggggggggggttggcatggagggaggccttcccatccaccctcaccctccaccccacctgtcactatagccaagcttgcggataataaagtgtggtgttcc

SEQ ID NO: 254 - protein, 200 aa, Homo sapiens
MSPEPALSPALQLLLWHSALWTVQEATPLGPASSLPQSFLLKCLEQVRKIQGDGAALQEKLCATYKLCHPEELVLLGHSLGIPWAPLSSCPSQALQLAGCLSQLHSGLFLYQGLLQALEGISPELGPTLDTLQLDVADFATTIWQQMEELGMAPALQPTQGAMPAFASAFQRRAGGVLVASHLQSFLEVSYRVLRHLAQP

SEQ ID NO: 255 - protein, 207 aa, Homo sapiens
MAGPATQSPMKLMALQLLLWHSALWTVQEATPLGPASSLPQSFLLKCLEQVRKIQGDGAALQEKLVSECATYKLCHPEELVLLGHSLGIPWAPLSSCPSQALQLAGCLSQLHSGLFLYQGLLQALEGISPELGPTLDTLQLDVADFATTIWQQMEELGMAPALQPTQGAMPAFASAFQRRAGGVLVASHLQSFLEVSYRVLRHLAQP

SEQ ID NO: 256 - protein, 204 aa, Homo sapiens
MAGPATQSPMKLMALQLLLWHSALWTVQEATPLGPASSLPQSFLLKCLEQVRKIQGDGAALQEKLCATYKLCHPEELVLLGHSLGIPWAPLSSCPSQALQLAGCLSQLHSGLFLYQGLLQALEGISPELGPTLDTLQLDVADFATTIWQQMEELGMAPALQPTQGAMPAFASAFQRRAGGVLVASHLQSFLEVSYRVLRHLAQP

SEQ ID NO: 257 - protein, 207 aa, Homo sapiens; identical to SEQ ID NO: 255

SEQ ID NO: 258 - protein, 204 aa, Homo sapiens; identical to SEQ ID NO: 256

SEQ ID NO: 259 - protein, 200 aa, Homo sapiens; identical to SEQ ID NO: 254

SEQ ID NO: 260 - protein, 208 aa, Mus musculus
MAQLSAQRRMKLMALQLLLWQSALWSGREAVPLVTVSALPPSLPLPRSFLLKSLEQVRKIQASGSVLLEQLCATYKLCHPEELVLLGHSLGIPKASLSGCSSQALQQTQCLSQLHSGLCLYQGLLQALSGISPALAPTLDLLQLDVANFATTIWQQMENLGVAPTVQPTQSAMPAFTSAFQRRAGGVLAISYLQGFLETARLALHHLA

SEQ ID NO: 261 - protein, 208 aa, Mus musculus; identical to SEQ ID NO: 260

SEQ ID NO: 262 - DNA, 2226 bp, Homo sapiens
ctcgacccacgcgtccgcgcgccccaggagccaaagccgggctccaagtcggcgccccacgtcgaggctccgccgcagcctccggagttggccgcagacaagaaggggagggagcgggagagggaggagagctccgaagcgagagggccgagcgccatgcgccgcgccagcagagactacaccaagtacctgcgtggctcggaggagatgggcggcggccccggagccccgcacgagggccccctgcacgccccgccgccgcctgcgccgcaccagccccccgccgcctcccgctccatgttcgtggccctcctggggctggggctgggccaggttgtctgcagcgtcgccctgttcttctatttcagagcgcagatggatcctaatagaatatcagaagatggcactcactgcatttatagaattttgagactccatgaaaatgcagattttcaagacacaactctggagagtcaagatacaaaattaatacctgattcatgtaggagaattaaacaggcctttcaaggagctgtgcaaaaggaattacaacatatcgttggatcacagcacatcagagcagagaaagcgatggtggatggctcatggttagatctggccaagaggagcaagcttgaagctcagccttttgctcatctcactattaatgccaccgacatcccatctggttcccataaagtgagtctgtcctcttggtaccatgatcggggttgggccaagatctccaacatgacttttagcaatggaaaactaatagttaatcaggatggcttttattacctgtatgccaacatttgctttcgacatcatgaaacttcaggagacctagctacagagtatcttcaactaatggtgtacgtcactaaaaccagcatcaaaatcccaagttctcataccctgatgaaaggaggaagcaccaagtattggtcagggaattctgaattccatttttattccataaacgttggtggattttttaagttacggtctggagaggaaatcagcatcgaggtctccaacccctccttactggatccggatcaggatgcaacatactttggggcttttaaagttcgagatatagattgagccccagtttttggagtgttatgtatttcctggatgtttggaaacattttttaaaacaagccaagaaagatgtatataggtgtgtgagactactaagaggcatggccccaacggtacacgactcagtatccatgctcttgaccttgtagagaacacgcgtatttacagccagtgggagatgttagactcatggtgtgttacacaatggtttttaaattttgtaatgaattcctagaattaaaccagattggagcaattacgggttgaccttatgagaaactgcatgtgggctatgggaggggttggtccctggtcatgtgccccttcgcagctgaagtggagagggtgtcatctagcgcaattgaaggatcatctgaaggggcaaattcttttgaattgttacatcatgctggaacctgcaaaaaatactttttctaatgaggagagaaaatatatgtatttttatataatatctaaagttatatttcagatgtaatgttttctttgcaaagtattgtaaattatatttgtgctatagtatttgattcaaaatatttaaaaatgtcttgctgttgacatatttaatgttttaaatgtacagacatatttaactggtgcactttgtaaattccctggggaaaacttgcagctaaggaggggaaaaaaatgttgtttcctaatatcaaatgcagtatatttcttcgttctttttaagttaatagattttttcagacttgtcaagcctgtgcaaaaaaattaaaatggatgccttgaataataagcaggatgttggccaccaggtgcctttcaaatttagaaactaattgactttagaaagctgacattgccaaaaaggatacataatgggccactgaaatctgtcaagagtagttatataattgttgaacaggtgtttttccacaagtgccgcaaattgtacctttttttttttttcaaaatagaaaagttattagtggtttatcagcaaaaaagtccaattttaatttagtaaatgttatcttatactgtacaataaaaacattgcctttgaatgttaattttttggtacaaaaataaatttatatgaaaacctgaaaaaaaaaacaaaaaaaaaaa

SEQ ID NO: 263 - DNA, 1931 bp, Homo sapiens
gcgcctggcctattgaaggtttttaatcttcagagtttcgactttatcaacaacacttagaagccaccaaagaattgcagatggatcctaatagaatatcagaagatggcactcactgcatttatagaattttgagactccatgaaaatgcagattttcaagacacaactctggagagtcaagatacaaaattaatacctgattcatgtaggagaattaaacaggcctttcaaggagctgtgcaaaaggaattacaacatatcgttggatcacagcacatcagagcagagaaagcgatggtggatggctcatggttagatctggccaagaggagcaagcttgaagctcagccttttgctcatctcactattaatgccaccgacatcccatctggttcccataaagtgagtctgtcctcttggtaccatgatcggggttgggccaagatctccaacatgacttttagcaatggaaaactaatagttaatcaggatggcttttattacctgtatgccaacatttgctttcgacatcatgaaacttcaggagacctagctacagagtatcttcaactaatggtgtacgtcactaaaaccagcatcaaaatcccaagttctcataccctgatgaaaggaggaagcaccaagtattggtcagggaattctgaattccatttttattccataaacgttggtggattttttaagttacggtctggagaggaaatcagcatcgaggtctccaacccctccttactggatccggatcaggatgcaacatactttggggcttttaaagttcgagatatagattgagccccagtttttggagtgttatgtatttcctggatgtttggaaacattttttaaaacaagccaagaaagatgtatataggtgtgtgagactactaagaggcatggccccaacggtacacgactcagtatccatgctcttgaccttgtagagaacacgcgtatttacagccagtgggagatgttagactcatggtgtgttacacaatggtttttaaattttgtaatgaattcctagaattaaaccagattggagcaattacgggttgaccttatgagaaactgcatgtgggctatgggaggggttggtccctggtcatgtgccccttcgcagctgaagtggagagggtgtcatctagcgcaattgaaggatcatctgaaggggcaaattcttttgaattgttacatcatgctggaacctgcaaaaaatactttttctaatgaggagagaaaatatatgtatttttatataatatctaaagttatatttcagatgtaatgttttctttgcaaagtattgtaaattatatttgtgctatagtatttgattcaaaatatttaaaaatgtcttgctgttgacatatttaatgttttaaatgtacagacatatttaactggtgcactttgtaaattccctggggaaaacttgcagctaaggaggggaaaaaaatgttgtttcctaatatcaaatgcagtatatttcttcgttctttttaagttaatagattttttcagacttgtcaagcctgtgcaaaaaaattaaaatggatgccttgaataataagcaggatgttggccaccaggtgcctttcaaatttagaaactaattgactttagaaagctgacattgccaaaaaggatacataatgggccactgaaatctgtcaagagtagttatataattgttgaacaggtgtttttccacaagtgccgcaaattgtaccttttttgttttttcaaaatagaaaagttattagtggtttatcagcaaaaaagtccaattttaatttagtaaatgttatcttatactgtacaataaaaacattgcctttgaatgttaattttttggtacaaaaataaatttatatgaaaacctgaaaaaaaaaaaaaaaaaaaaaa

SEQ ID NO: 264 - DNA, 2299 bp, Mus musculus
gagctcggatccactactcgacccacgcgtccgcccacgcgtccggccaggacctctgtgaaccggtcggggcgggggccgcctggccgggagtctgctcggcggtgggtggccgaggaagggagagaacgatcgcggagcagggcgcccgaactccgggcgccgcgccatgcgccgggccagccgagactacggcaagtacctgcgcagctcggaggagatgggcagcggccccggcgtcccacacgagggtccgctgcaccccgcgccttctgcaccggctccggcgccgccacccgccgcctcccgctccatgttcctggccctcctggggctgggactgggccaggtggtctgcagcatcgctctgttcctgtactttcgagcgcagatggatcctaacagaatatcagaagacagcactcactgcttttatagaatcctgagactccatgaaaacgcaggtttgcaggactcgactctggagagtgaagacacactacctgactcctgcaggaggatgaaacaagcctttcagggggccgtgcagaaggaactgcaacacattgtggggccacagcgcttctcaggagctccagctatgatggaaggctcatggttggatgtggcccagcgaggcaagcctgaggcccagccatttgcacacctcaccatcaatgctgccagcatcccatcgggttcccataaagtcactctgtcctcttggtaccacgatcgaggctgggccaagatctctaacatgacgttaagcaacggaaaactaagggttaaccaagatggcttctattacctgtacgccaacatttgctttcggcatcatgaaacatcgggaagcgtacctacagactatcttcagctgatggtgtatgtcgttaaaaccagcatcaaaatcccaagttctcataacctgatgaaaggagggagcacgaaaaactggtcgggcaattctgaattccacttttattccataaatgttgggggatttttcaagctccgagctggtgaagaaattagcattcaggtgtccaacccttccctgctggatccggatcaagatgcgacgtactttggggctttcaaagttcaggacatagactgagactcatttcgtggaacattagcatggatgtcctagatgtttggaaacttcttaaaaaatggatgatgtctatacatgtgtaagactactaagagacatggcccacggtgtatgaaactcacagccctctctcttgagcctgtacaggttgtgtatatgtaaagtccataggtgatgttagattcatggtgattacacaacggttttacaattttgtaatgatttcctagaattgaaccagattgggagaggtattccgatgcttatgaaaaacttacacgtgagctatggaagggggtcacagtctctgggtctaacccctggacatgtgccactgagaaccttgaaattaagaggatgccatgtcattgcaaagaaatgatagtgtgaagggttaagttcttttgaattgttacattgcgctgggacctgcaaataagttctttttttctaatgaggagagaaaaatatatgtatttttatataatgtctaaagttatatttcaggtgtaatgttttctgtgcaaagttttgtaaattatatttgtgctatagtatttgattcaaaatatttaaaaatgtctcactgttgacatatttaatgttttaaatgtacagatgtatttaactggtgcactttgtaattcccctgaaggtactcgtagctaagggggcagaatactgtttctggtgaccacatgtagtttatttctttattctttttaacttaatagagtcttcagacttgtcaaaactatgcaagcaaaataaataaataaaaataaaatgaataccttgaataataagtaggatgttggtcaccaggtgcctttcaaatttagaagctaattgactttaggagctgacatagccaaaaaggatacataataggctactgaaatctgtcaggagtatttatgcaattattgaacaggtgtctttttttacaagagctacaaattgtaaattttgtttcttttttttcccatagaaaatgtactatagtttatcagccaaaaaacaatccactttttaatttagtgaaagttattttattatactgtacaataaaagcattgtctctgaatgttaattttttggtacaaaaaataaatttgtacgaaaacctgaaaaaaaaaaaaaaaaagggcggccgctctagagggccctattctatag

SEQ ID NO: 265 - protein, 244 aa, Homo sapiens
MDPNRISEDGTHCIYRILRLHENADFQDTTLESQDTKLIPDSCRRIKQAFQGAVQKELQHIVGSQHIRAEKAMVDGSWLDLAKRSKLEAQPFAHLTINATDIPSGSHKVSLSSWYHDRGWAKISNMTFSNGKLIVNQDGFYYLYANICFRHHETSGDLATEYLQLMVYVTKTSIKIPSSHTLMKGGSTKYWSGNSEFHFYSINVGGFFKLRSGEEISIEVSNPSLLDPDQDATYFGAFKVRDID

SEQ ID NO: 266 - protein, 317 aa, Homo sapiens
MRRASRDYTKYLRGSEEMGGGPGAPHEGPLHAPPPPAPHQPPAASRSMFVALLGLGLGQVVCSVALFFYFRAQMDPNRISEDGTHCIYRILRLHENADFQDTTLESQDTKLIPDSCRRIKQAFQGAVQKELQHIVGSQHIRAEKAMVDGSWLDLAKRSKLEAQPFAHLTINATDIPSGSHKVSLSSWYHDRGWAKISNMTFSNGKLIVNQDGFYYLYANICFRHHETSGDLATEYLQLMVYVTKTSIKIPSSHTLMKGGSTKYWSGNSEFHFYSINVGGFFKLRSGEEISIEVSNPSLLDPDQDATYFGAFKVRDID

SEQ ID NO: 267 - protein, 317 aa, Homo sapiens; identical to SEQ ID NO: 266

SEQ ID NO: 268 - protein, 244 aa, Homo sapiens; identical to SEQ ID NO: 265

SEQ ID NO: 269 - protein, 317 aa, Homo sapiens; identical to SEQ ID NO: 266

SEQ ID NO: 270 - protein, 316 aa, Mus musculus
MRRASRDYGKYLRSSEEMGSGPGVPHEGPLHPAPSAPAPAPPPAASRSMFLALLGLGLGQVVCSIALFLYFRAQMDPNRISEDSTHCFYRILRLHENAGLQDSTLESEDTLPDSCRRMKQAFQGAVQKELQHIVGPQRFSGAPAMMEGSWLDVAQRGKPEAQPFAHLTINAASIPSGSHKVTLSSWYHDRGWAKISNMTLSNGKLRVNQDGFYYLYANICFRHHETSGSVPTDYLQLMVYVVKTSIKIPSSHNLMKGGSTKNWSGNSEFHFYSINVGGFFKLRAGEEISIQVSNPSLLDPDQDATYFGAFKVQDID

SEQ ID NO: 271 - protein, 316 aa, Mus musculus; identical to SEQ ID NO: 270

SEQ ID NO: 272 - protein, 401 aa, Homo sapiens
MNKLLCCALVFLDISIKWTTQETFPPKYLHYDEETSHQLLCDKCPPGTYLKQHCTAKWKTVCAPCPDHYYTDSWHTSDECLYCSPVCKELQYVKQECNRTHNRVCECKEGRYLEIEFCLKHRSCPPGFGVVQAGTPERNTVCKRCPDGFFSNETSSKAPCRKHTNCSVFGLLLTQKGNATHDNICSGNSESTQKCGIDVTLCEEAFFRFAVPTKFTPNWLSVLVDNLPGTKVNAESVERIKRQHSSQEQTFQLLKLWKHQNKDQDIVKKIIQDIDLCENSVQRHIGHANLTFEQLRSLMESLPGKKVGAEDIEKTIKACKPSDQILKLLSLWRIKNGDQDTLKGLMHALKHSKTYHFPKTVTQSLKKTIRFLHSFTMYKLYQKLFLEMIGNQVQSVKISCL

SEQ ID NO: 273 - DNA, 1047 bp, Homo sapiens
cgaattcccctatcacctaagtgtgggctaatgtaacaaagagggatttcacctacatccattcagtcagtctttgggggtttaaagaaattccaaagagtcatcagaagaggaaaaatgaaggtaatgttttttcagacaggtaaagtctttgaaaatatgtgtaatatgtaaaacattttgacacccccataatatttttccagaattaacagtataaattgcatctcttgttcaagagttccctatcactctctttaatcactactcacagtaacctcaactcctgccacaatgtacaggatgcaactcctgtcttgcattgcactaagtcttgcacttgtcacaaacagtgcacctacttcaagttctacaaagaaaacacagctacaactggagcatttactgctggatttacagatgattttgaatggaattaataattacaagaatcccaaactcaccaggatgctcacatttaagttttacatgcccaagaaggccacagaactgaaacatcttcagtgtctagaagaagaactcaaacctctggaggaagtgctaaatttagctcaaagcaaaaactttcacttaagacccagggacttaatcagcaatatcaacgtaatagttctggaactaaagggatctgaaacaacattcatgtgtgaatatgctgatgagacagcaaccattgtagaatttctgaacagatggattaccttttgtcaaagcatcatctcaacactgacttgataattaagtgcttcccacttaaaacatatcaggccttctatttatttaaatatttaaattttatatttattgttgaatgtatggtttgctacctattgtaactattattcttaatcttaaaactataaatatggatcttttatgattctttttgtaagccctaggggctctaaaatggtttcacttatttatcccaaaatatttattattatgttgaatgttaaatatagtatctatgtagattggttagtaaaactatttaataaatttgataaatataaaaaaaaaaaa

SEQ ID NO: 274 - DNA, 939 bp, Mus musculus
atcacccttgctaatcactcctcacagtgacctcaagtcctgcaggcatgtacagcatgcagctcgcatcctgtgtcacattgacacttgtgctccttgtcaacagcgcacccacttcaagctccacttcaagctctacagcggaagcacagcagcagcagcagcagcagcagcagcagcagcagcacctggagcagctgttgatggacctacaggagctcctgagcaggatggagaattacaggaacctgaaactccccaggatgctcaccttcaaattttacttgcccaagcaggccacagaattgaaagatcttcagtgcctagaagatgaacttggacctctgcggcatgttctggatttgactcaaagcaaaagctttcaattggaagatgctgagaatttcatcagcaatatcagagtaactgttgtaaaactaaagggctctgacaacacatttgagtgccaattcgatgatgagtcagcaactgtggtggactttctgaggagatggatagccttctgtcaaagcatcatctcaacaagccctcaataactatgtacctcctgcttacaacacataaggctctctatttatttaaatatttaactttaatttatttttggatgtattgtttactatcttttgtaactactagtcttcagatgataaatatggatctttaaagattctttttgtaagccccaagggctcaaaaatgttttaaactatttatctgaaattatttattatattgaattgttaaatatcatgtgtaggtagactcattaataaaagtatttagatgattcaaatataaataagctcagatgtctgtcatttttaggacagcacaaagtaagcgctaaaataacttctcagttattcctgtgaactctatgttaatcagtgttttcaagaaataaagctctcctct

SEQ ID NO: 275 - protein, 153 aa, Homo sapiens
MYRMQLLSCIALSLALVTNSAPTSSSTKKTQLQLEHLLLDLQMILNGINNYKNPKLTRMLTFKFYMPKKATELKHLQCLEEELKPLEEVLNLAQSKNFHLRPRDLISNINVIVLELKGSETTFMCEYADETATIVEFLNRWITFCQSIISTLT

SEQ ID NO: 276 - protein, 153 aa, Homo sapiens; identical to SEQ ID NO: 275

SEQ ID NO: 277 - protein, 156 aa, Homo sapiens
MYRMQLLSCIALILALVTNSAPTSSSTKKTKKTQLQLEHLLLDLQMILNGINNYKNPKLTRMLTFKFYMPKKATELKQLQCLEEELKPLEEVLNLAQSKNFHLRPRDLISNINVIVLELKGSETTFMCEYADETATIVEFLNRWITFCQSIISTLT

SEQ ID NO: 278 - protein, 139 aa, Homo sapiens
  MOD_RES (29): Variable amino acid
  MOD_RES (42): Variable amino acid
QLLFCIALSLALVPNSAPTSSSTKKTQLXLEHLLLDLQMILXGINNYKNPKLTRMLTFKFYMPKKATELKHLQCLEEELKPLEEVLNLAQSKNFHLRPRDLISNINVIVLELKGSETTFMCEYADETATIVEFLNRWIT

SEQ ID NO: 279 - protein, 153 aa, Homo sapiens [sequence omitted]

SEQ ID NO: 280 - protein, 153 aa, Homo sapiens [sequence omitted]

SEQ ID NO: 281 - protein, 133 aa, Homo sapiens [sequence omitted]

SEQ ID NO: 282 - protein, 38 aa, Homo sapiens
MYRMQLLSCIALSLALVTNSAPTSSSTKKTQLQLEHLL

SEQ ID NO: 283 - protein, 133 aa, Homo sapiens [sequence omitted]

SEQ ID NO: 284 - protein, 37 aa, Homo sapiens
QMILNGINNYKNPKLTRMLTFKFYMPKKATELKHLQC

SEQ ID NO: 285 - protein, 150 aa, Homo sapiens
MYRMQLLSCIALSLALVTNSAPTSSSTKKTQLQLEHLLLDLQMILNGINNYKNPKLTRMLTFKFYMPKKATELKHLQCLEEELKPLEEVLNLAQSKNFHLRPRDLISNINVIVLELKGSETTFMCEYADETATIVEFLNRWITFCQSIIS

SEQ ID NO: 286 - protein, 169 aa, Mus musculus
MYSMQLASCVTLTLVLLVNSAPTSSSTSSSTAEAQQQQQQQQQQQQHLEQLLMDLQELLSRMENYRNLKLPRMLTFKFYLPKQATELKDLQCLEDELGPLRHVLDLTQSKSFQLEDAENFISNIRVTVVKLKGSDNTFECQFDDESATVVDFLRRWIAFCQSIISTSPQ

SEQ ID NO: 287 - protein, 169 aa, Mus musculus; identical to SEQ ID NO: 286

SEQ ID NO: 288 - DNA, 921 bp, Homo sapiens
ttctatgcaaagcaaaaagccagcagcagccccaagctgataagattaatctaaagagcaaattatggtgtaatttcctatgctgaaactttgtagttaattttttaaaaaggtttcattttcctattggtctgatttcacaggaacattttacctgtttgtgaggcattttttctcctggaagagaggtgctgattggccccaagtgactgacaatctggtgtaacgaaaatttccaatgtaaactcattttccctcggtttcagcaattttaaatctatatatagagatatctttgtcagcattgcatcgttagcttctcctgataaactaattgcctcacattgtcactgcaaatcgacacctattaatgggtctcacctcccaactgcttccccctctgttcttcctgctagcatgtgccggcaactttgtccacggacacaagtgcgatatcaccttacaggagatcatcaaaactttgaacagcctcacagagcagaagactctgtgcaccgagttgaccgtaacagacatctttgctgcctccaagaacacaactgagaaggaaaccttctgcagggctgcgactgtgctccggcagttctacagccaccatgagaaggacactcgctgcctgggtgcgactgcacagcagttccacaggcacaagcagctgatccgattcctgaaacggctcgacaggaacctctggggcctggcgggcttgaattcctgtcctgtgaaggaagccaaccagagtacgttggaaaacttcttggaaaggctaaagacgatcatgagagagaaatattcaaagtgttcgagctgaatattttaatttatgagtttttgatagctttattttttaagtatttatatatttataactcatcataaaataaagtatatatagaatct

SEQ ID NO: 289 - DNA, 873 bp, Homo sapiens
ttctatgcaaagcaaaaagccagcagcagccccaagctgataagattaatctaaagagcaaattatggtgtaatttcctatgctgaaactttgtagttaattttttaaaaaggtttcattttcctattggtctgatttcacaggaacattttacctgtttgtgaggcattttttctcctggaagagaggtgctgattggccccaagtgactgacaatctggtgtaacgaaaatttccaatgtaaactcattttccctcggtttcagcaattttaaatctatatatagagatatctttgtcagcattgcatcgttagcttctcctgataaactaattgcctcacattgtcactgcaaatcgacacctattaatgggtctcacctcccaactgcttccccctctgttcttcctgctagcatgtgccggcaactttgtccacggacacaagtgcgatatcaccttacaggagatcatcaaaactttgaacagcctcacagagcagaagaacacaactgagaaggaaaccttctgcagggctgcgactgtgctccggcagttctacagccaccatgagaaggacactcgctgcctgggtgcgactgcacagcagttccacaggcacaagcagctgatccgattcctgaaacggctcgacaggaacctctggggcctggcgggcttgaattcctgtcctgtgaaggaagccaaccagagtacgttggaaaacttcttggaaaggctaaagacgatcatgagagagaaatattcaaagtgttcgagctgaatattttaatttatgagtttttgatagctttattttttaagtatttatatatttataactcatcataaaataaagtatatatagaatct

SEQ ID NO: 290 - DNA, 605 bp, Mus musculus
ggatccccgggcagagctggggggggatttgttagcatctcttgataaacttaattgtctctcgtcactgacggcacagagctattgatgggtctcaacccccagctagttgtcatcctgctcttctttctcgaatgtaccaggagccatatccacggatgcgacaaaaatcacttgagagagatcatcggcattttgaacgaggtcacaggagaagggacgccatgcacggagatggatgtgccaaacgtcctcacagcaacgaagaacaccacagagagtgagctcgtctgtagggcttccaaggtgcttcgcatattttatttaaaacatgggaaaactccatgcttgaagaagaactctagtgttctcatggagctgcagagactctttcgggcttttcgatgcctggattcatcgataagctgcaccatgaatgagtccaagtccacatcactgaaagacttcctggaaagcctaaagagcatcatgcaaatggattactcgtagtactgagccaccatgctttaacttatgaatttttaatggttttattttaatatttatatatttataattcataaaataaaatatttgtataatgt

SEQ ID NO: 291 - protein, 137 aa, Homo sapiens
MGLTSQLLPPLFFLLACAGNFVHGHKCDITLQEIIKTLNSLTEQKNTTEKETFCRAATVLRQFYSHHEKDTRCLGATAQQFHRHKQLIRFLKRLDRNLWGLAGLNSCPVKEANQSTLENFLERLKTIMREKYSKCSS

SEQ ID NO: 292 - protein, 153 aa, Homo sapiens [sequence omitted]

SEQ ID NO: 293 - protein, 137 aa, Homo sapiens; identical to SEQ ID NO: 291

SEQ ID NO: 294 - protein, 153 aa, Homo sapiens [sequence omitted]

SEQ ID NO: 295 - protein, 153 aa, Homo sapiens [sequence omitted]

SEQ ID NO: 296 - protein, 114 aa, Homo sapiens
GHKCDITLQEIIKTLNSLTEQKNTTEKETFCRAATVLRQFYSHHEKDTRCLGATAQQFHGHKQLIRFLKRLDRNLWGLAGLNSCPVKEANQSTLENFLERLKTIMREKYSKCSS

SEQ ID NO: 297 - protein, 140 aa, Mus musculus
MGLNPQLVVILLFFLECTRSHIHGCDKNHLREIIGILNEVTGEGTPCTEMDVPNVLTATKNTTESELVCRASKVLRIFYLKHGKTPCLKKNSSVLMELQRLFRAFRCLDSSISCTMNESKSTSLKDFLESLKSIMQMDYS

SEQ ID NO: 298 - protein, 140 aa, Mus musculus; identical to SEQ ID NO: 297

SEQ ID NO: 299 - protein, 140 aa, Mus musculus; identical to SEQ ID NO: 297

SEQ ID NO: 300 - DNA, 1282 bp, Homo sapiens
aagccacccagcctatgcatccgctcctcaatcctctcctgttggcactgggcctcatggcgcttttgttgaccacggtcattgctctcacttgccttggcggctttgcctccccaggccctgtgcctccctctacagccctcagggagctcattgaggagctggtcaacatcacccagaaccagaaggctccgctctgcaatggcagcatggtatggagcatcaacctgacagctggcatgtactgtgcagccctggaatccctgatcaacgtgtcaggctgcagtgccatcgagaagacccagaggatgctgagcggattctgcccgcacaaggtctcagctgggcagttttccagcttgcatgtccgagacaccaaaatcgaggtggcccagtttgtaaaggacctgctcttacatttaaagaaactttttcgcgagggacagttcaactgaaacttcgaaagcatcattatttgcagagacaggacctgactattgaagttgcagattcatttttctttctgatgtcaaaaatgtcttgggtaggcgggaaggagggttagggaggggtaaaattccttagcttagacctcagcctgtgctgcccgtcttcagcctagccgacctcagccttccccttgcccagggctcagcctggtgggcctcctctgtccagggccctgagctcggtggacccagggatgacatgtccctacacccctcccctgccctagagcacactgtagcattacagtgggtgccccccttgccagacatgtggtgggacagggacccacttcacacacaggcaactgaggcagacagcagctcaggcacacttcttcttggtcttatttattattgtgtgttatttaaatgagtgtgtttgtcaccgttggggattggggaagactgtggctgctagcacttggagccaagggttcagagactcagggccccagcactaaagcagtggacaccaggagtccctggtaataagtactgtgtacagaattctgctacctcactggggtcctggggcctcggagcctcatccgaggcagggtcaggagaggggcagaacagccgctcctgtctgccagccagcagccagctctcagccaacgagtaatttattgtttttccttgtatttaaatattaaatatgttagcaaagagttaatatatagaagggtaccttgaacactgggggaggggacattgaacaagttgtttcattgactatcaaactgaagccagaaataaagttggtgacagat

SEQ ID NO: 301 - DNA, 1207 bp, Mus musculus
gacaagccagcagcctaggccagcccacagttctacagctccctggttctctcactggctctgggcttcatggcgctctgggtgactgcagtcctggctcttgcttgccttggtggtctcgccgccccagggccggtgccaagatctgtgtctctccctctgacccttaaggagcttattgaggagctgagcaacatcacacaagaccagactcccctgtgcaacggcagcatggtatggagtgtggacctggccgctggcgggttctgtgtagccctggattccctgaccaacatctccaattgcaatgccatctacaggacccagaggatattgcatggcctctgtaaccgcaaggcccccactacggtctccagcctccccgataccaaaatcgaagtagcccactttataacaaaactgctcagctacacaaagcaactgtttcgccacggccccttctaatgaggagagaccatccctgggcatctcagctgtggactcattttcctttctcacatcagactttgctggggagaggcagggaggagggttgaggaggaagggagatgcctcagctttggcctcagcctgcactgcctgcctagtgctcagggtctcagcctggcaacacccccaccccacccccacccccgccgccccatcccatccctacagaaaactgcagcaagaccgtgagtccagcctgtggcctggtccacacagggcaactgaggcaggcagcagcttgagcacatttcttcttgatcttatttattatggttgtgtgttatttaaatgagtctgtcagtatcccggtggggacatggtttgctgcctatgccctgggggctccagcattgaagcagtgggctctggggtccctggcaatattactgtatacataactctgctacctcactgtagcctccaggtctcaccccaggcagggagatgggaggggaggccagagcaacactcctgtctgccacggcagcaaccagccctcagccatgaaataacttattgttttgttcttatatttaaagtattaaatagcttagcaaagagttaataatatatggaagaatggcctgttacactcaaggtgatgtgtagtgaatggggggagggtggtgggtttgtcactgaacaaacttttcattgactgtcaaactagaaaccggaaataaagatggtgacagat

SEQ ID NO: 302 - protein, 146 aa, Homo sapiens
MHPLLNPLLLALGLMALLLTTVIALTCLGGFASPGPVPPSTALRELIEELVNITQNQKAPLCNGSMVWSINLTAGMYCAALESLINVSGCSAIEKTQRMLSGFCPHKVSAGQFSSLHVRDTKIEVAQFVKDLLLHLKKLFREGQFN

SEQ ID NO: 303 - protein, 132 aa, Homo sapiens
MALLLTTVIALTCLGGFASPGPVPPSTALRELIEELVNITQNQKAPLCNGSMVWSINLTAGMYCAALESLINVSGCSAIEKTQRMLSGFCPHKVSAGQFSSLHVRDTKIEVAQFVKDLLLHLKKLFREGRFN

SEQ ID NO: 304 - protein, 159 aa, Homo sapiens
MHPLLNPLLLALGLMALLLTTVIALTCLGGFASPGPVPPSTALRELIEELVNITQNQKAPLCNGSMVWSINLTAGMYCAALESLINVSGCSAIEKTQRMLSGFCPHKVSAGQFSSLHVRDTKIEVAQFVKDLLLHLKKLFREGQFNRNFESIIICRDRT

SEQ ID NO: 305 - protein, 81 aa, Homo sapiens
MVWSINLTAGMYCAALESLINVSGCSAIEKTQRMLSGFCPHKVSAGQFSSLHVRDTKIEVAQFVKDLLLHLKKLFREGRFN

SEQ ID NO: 306 - protein, 146 aa, Homo sapiens; identical to SEQ ID NO: 302

SEQ ID NO: 307 - protein, 81 aa, Homo sapiens
MVWSINLTAGMYCAALESLINVSGCSAIEKTQRMLSGFCPHKVSAGQFSSLHVRDTKIEVAQFVKDLLLHLKKLFREGQFN

SEQ ID NO: 308 - protein, 131 aa, Mus musculus
MALWVTAVLALACLGGLAAPGPVPRSVSLPLTLKELIEELSNITQDQTPLCNGSMVWSVDLAAGGFCVALDSLTNISNCNAIYRTQRILHGLCNRKAPTTVSSLPDTKIEVAHFITKLLSYTKQLFRHGPF

SEQ ID NO: 309 - protein, 131 aa, Mus musculus; identical to SEQ ID NO: 308

SEQ ID NO: 310 - protein, 131 aa, Mus musculus; identical to SEQ ID NO: 308

SEQ ID NO: 311 - DNA, 1498 bp, Homo sapiens
accaaacctcttcgaggcacaaggcacaacaggctgctctgggattctcttcagccaatcttcattgctcaagtgtctgaagcagccatggcagaagtacctgagctcgccagtgaaatgatggcttattacagtggcaatgaggatgacttgttctttgaagctgatggccctaaacagatgaagtgctccttccaggacctggacctctgccctctggatggcggcatccagctacgaatctccgaccaccactacagcaagggcttcaggcaggccgcgtcagttgttgtggccatggacaagctgaggaagatgctggttccctgcccacagaccttccaggagaatgacctgagcaccttctttcccttcatctttgaagaagaacctatcttcttcgacacatgggataacgaggcttatgtgcacgatgcacctgtacgatcactgaactgcacgctccgggactcacagcaaaaaagcttggtgatgtctggtccatatgaactgaaagctctccacctccagggacaggatatggagcaacaagtggtgttctccatgtcctttgtacaaggagaagaaagtaatgacaaaatacctgtggccttgggcctcaaggaaaagaatctgtacctgtcctgcgtgttgaaagatgataagcccactctacagctggagagtgtagatcccaaaaattacccaaagaagaagatggaaaagcgatttgtcttcaacaagatagaaatcaataacaagctggaatttgagtctgcccagttccccaactggtacatcagcacctctcaagcagaaaacatgcccgtcttcctgggagggaccaaaggcggccaggatataactgacttcaccatgcaatttgtgtcttcctaaagagagctgtacccagagagtcctgtgctgaatgtggactcaatccctagggctggcagaaagggaacagaaaggtttttgagtacggctatagcctggactttcctgttgtctacaccaatgcccaactgcctgccttagggtagtgctaagaggatctcctgtccatcagccaggacagtcagctctctcctttcagggccaatccccagcccttttgttgagccaggcctctctcacctctcctactcacttaaagcccgcctgacagaaaccacggccacatttggttctaagaaaccctctgtcattcgctcccacattctgatgagcaaccgcttccctatttatttatttatttgtttgtttgttttattcattggtctaatttattcaaagggggcaagaagtagcagtgtctgtaaaagagcctagtttttaatagctatggaatcaattcaatttggactggtgtgctctctttaaatcaagtcctttaattaagactgaaaatatataagctcagattatttaaatgggaatatttataaatgagcaaatatcatactgttcaatggttctgaaataaacttcactgaag

SEQ ID NO: 312 - DNA, 1345 bp, Mus musculus
cgaggcctaataggctcatctgggatcctctccagccaagcttccttgtgcaagtgtctgaagcagctatggcaactgttcctgaactcaactgtgaaatgccaccttttgacagtgatgagaatgacctgttctttgaagttgacggaccccaaaagatgaagggctgcttccaaacctttgacctgggctgtccagatgagagcatccagcttcaaatctcacagcagcacatcaacaagagcttcaggcaggcagtatcactcattgtggctgtggagaagctgtggcagctacctgtgtctttcccgtggaccttccaggatgaggacatgagcaccttcttttccttcatctttgaagaagagcccatcctctgtgactcatgggatgatgatgataacctgctggtgtgtgacgttcccattagacagctgcactacaggctccgagatgaacaacaaaaaagcctcgtgctgtcggacccatatgagctgaaagctctccacctcaatggacagaatatcaaccaacaagtgatattctccatgagctttgtacaaggagaaccaagcaacgacaaaatacctgtggccttgggcctcaaaggaaagaatctatacctgtcctgtgtaatgaaagacggcacacccaccctgcagctggagagtgtggatcccaagcaatacccaaagaagaagatggaaaagcggtttgtcttcaacaagatagaagtcaagagcaaagtggagtttgagtctgcagagttccccaactggtacatcagcacctcacaagcagagcacaagcctgtcttcctgggaaacaacagtggtcaggacataattgacttcaccatggaatctgtgtcttcctaaagtatgggctggactgtttctaatgccttccccagggcatgtgaaggagctcccttgtcatgaatgagcagacagctcaatctctaggagactccttagtcctcggccaagacaggtcgctcagggtcacaagaaaccatggcacattctgttcaaagagagcctgtgttttcctccttgcctctgatgggcaaccacttacctatttatttatgtatttattgattggttgatctatttaagttgattcaaggggacattaggcagcactctctagaacagaacctagctgtcaacgtgtgggggatgaattggtcatagcctgcactgaggtctttcattgaagctgagaataaataggttcctataatatggatgagaatttttatgaatgaagcaccagcacattgctttgatgagtatgaaataaatttcattaaaacaaacaaaaaaaaaaaaaaaaaaaa

SEQ ID NO: 313 - protein, 269 aa, Homo sapiens
MAEVPELASEMMAYYSGNEDDLFFEADGPKQMKCSFQDLDLCPLDGGIQLRISDHHYSKGFRQAASVVVAMDKLRKMLVPCPQTFQENDLSTFFPFIFEEEPIFFDTWDNEAYVHDAPVRSLNCTLRDSQQKSLVMSGPYELKALHLQGQDMEQQVVFSMSFVQGEESNDKIPVALGLKEKNLYLSCVLKDDKPTLQLESVDPKNYPKKKMEKRFVFNKIEINNKLEFESAQFPNWYISTSQAENMPVFLGGTKGGQDITDFTMQFVSS

SEQ ID NO: 314 - protein, 153 aa, Homo sapiens
APVRSLYCTLRDSQQKSLVMSGPYELKALHLQGQDMEQQVVFSMSFVQGEESNDKIPVALGLKEKNLYLSCVLKDDKPTLQLESVDPKNYPKKKMEKRFVFNKIEINNKLEFESAQFPNWYISTSQAENMPVFLGGTKGGQDITDFTMQFVSS

SEQ ID NO: 315 - protein, 269 aa, Homo sapiens; identical to SEQ ID NO: 313

SEQ ID NO: 316 - protein, 269 aa, Homo sapiens
MAEVPKLASEMMAYYSGNEDDLFFEADGPKQMKCSFQDLDLCPLDGGIQLRISDHHYSKGFRQAASVVVAMDKLRKMLVPCPQTFQENDLSTFFPFIFEEEPIFFDTWDNEAYVHDAPVRSLNCTLRDSQQKSLVMSGPYELKALHLQGQDMEQQVVFSMSFVQGEESNDKIPVALGLKEKNLYLSCVLKDDKPTLQLESVDPKNYPKKKMEKRFVFNKIEINNKLEFESAQFPNWYISTSQAENMPVFLGGTKGGQDITDFTMQFVSS

SEQ ID NO: 317 - protein, 269 aa, Homo sapiens; identical to SEQ ID NO: 313

SEQ ID NO: 318 - protein, 269 aa, Mus musculus
MATVPELNCEMPPFDSDENDLFFEVDGPQKMKGCFQTFDLGCPDESIQLQISQQHINKSFRQAVSLIVAVEKLWQLPVSFPWTFQDEDMSTFFSFIFEEEPILCDSWDDDDNLLVCDVPIRQLHYRLRDEQQKSLVLSDPYELKALHLNGQNINQQVIFSMSFVQGEPSNDKIPVALGLKGKNLYLSCVMKDGTPTLQLESVDPKQYPKKKMEKRFVFNKIEVKSKVEFESAEFPNWYISTSQAEHKPVFLGNNSGQDIIDFTMESVSS

SEQ ID NO: 319 - protein, 269 aa, Mus musculus; identical to SEQ ID NO: 318

SEQ ID NO: 320 - DNA, 396 bp, Mus musculus
tttcgaagtctttgacctcaacatgaagatttccacacttctatgcctcctgctcatagctaccaccatcagtcctcaggtattggctggaccagatgcggtgagcaccccagtcacgtgctgttataatgttgttaagcagaagattcacgtccggaagctgaagagctacaggagaatcacaagcagccagtgtccccgggaagctgtgatcttcaggaccatactggataaggagatctgtgctgaccccaaggagaagtgggttaagaattccataaaccacttggataagacgtctcgaacgtagcatccttgaaccttcatgtctaggctgagagttccaaaaactcttacgtatttccccctgaagttccccacgggcagtgtgatatt

SEQ ID NO: 321 - protein, 95 aa, Mus musculus
MKISTLLCLLLIATTISPQVLAGPDAVSTPVTCCYNVVKQKIHVRKLKSYRRITSSQCPREAVIFRTILDKEICADPKEKWVKNSINHLDKTSRT

SEQ ID NO: 322 - protein, 104 aa, Mus musculus
MKISTLLCLLLIATTISPQVLAGPDAVSTPVTCCYNVVKQKIHVRKLKSYRRITSSQCPREAVIFRTILDKEICADPKEKWVKNSINHLDKTSQTFILEPSCLG

SEQ ID NO: 323 - protein, 104 aa, Mus musculus; identical to SEQ ID NO: 322

SEQ ID NO: 324 - protein, 104 aa, Mus musculus; identical to SEQ ID NO: 322

SEQ ID NO: 325 - DNA, 3008 bp, Mus musculus
actgcacactgttccctctcttagaactagcatgttgggtgttatgtagtcaaaggagggcattatgagctgtaccccagggacttcctgatcctcttacatgtataaatagcaagaccgggccaggaacagcaagcagtctgaaggccagctgggtctgcccactaagaagatgaagccttttcatactgccctctccttcctcattcttacaactgctcttggaatctgggcccagatcacacatgcaacagagacaaaagaagtccagagcagtctgaaggcacagcaagggcttgaaattgaaatgtttcacatgggctttcaagactcttcagattgctgcctgtcctataactcacggattcagtgttcaagatttataggttattttcccaccagtggtgggtgtaccaggccgggcatcatctttatcagcaagagggggttccaggtctgtgccaaccccagtgatcggagagttcagagatgcattgaaagattggagcaaaactcacaaccacggacctacaaacaataacatttgcttgaagagaagggtgtgaactgccagctactttctttggtcttccccagtgaccacctaagtggctctaagtgtttatttttataggtatataaacattttttttttctgttccactttaaagtggcatatctggctttgtcacagaggggaaacttgtctgtgccaaccccagtcatctgaaaactcagatgcctggaaggtctgaagctgacctcaatgactacacataatatttgattgagataaatgggcaaggtctggagagatggcttggtggttaagagcacctgctgctcttccagaggacctgggttcaattcccacttagatggcagctcaaactatctataattccaattccaaagaaaactgatgccctattttgccctttagttagtagtatttacagtattctttataaattcaccttgacatgaccatcttgagctacagccatcctaactgcctcagaatcactcaagttcttccactcggtttcccagcggattttaagtggataaactgtgagagtggtctgtgggactttggaatgtgtctggttctgatagtcacttatggcaacccaggtacattcaactaggatgaaataaattctgccttagcccagtagtatgtctgtgtttgtaaggacccagctgattttcccaccacccctccatcagtaagccactaataaagtgcatctatgcagccacaggtctgtctgcctcttttgcttcagtttcctaggactatgggctgaaattgggctgttagggagaaagcatctcactcgcttttattgaatctgcagtggaaaagaaacagagggagtcaggtaactttgaatattttcttcaaaacaaaagatatcatggtacaatttttttttaattttttgtttgtttgtttttgtttttcgagacagggtttctctgtgtagccctggctgtcctggaactcactctgtagaccaggttggcctccaactcagaaatccgcctgcctctgcctcccgagtgctgggattaaaggcgtgcgccaccaccacccggcccatggtacaatttttaaatttccagaaatatagtttattccaatgtagacttcatatcaaggatgtattttacccactatagagagaatcattaaagtgatctacaaatctttggaagttctccctgttcgataagatcctcaattctattcgaggatctcaacttggtcagcttgtttttataccagtctcatgctgtttttttactgtggctctgtatgataatcccttcagcagtgtctctattgttcaggggtgtttgggttacctaagatcttttgtgtttccatatgaattttaagattgttattttcaaaatctgtgaagaattgcattggaattttgatgggaattgcaatgaatctataaattttttttgataagctgaccattgtcaaaatattaaactagaccatgagcataggtggtctttccatcttctgggtcttctttgattgttttagagttttcattgtataggccttttgctttattcattaggtttattccaagatattattttgcaggtattgagagtgggattttcctcccaatttcttcctcagtatgtttgtcatttgcttataggaagactattggtttttttgtatgtgcagatcgtgtcctgacacttggctgaaagtgtttatcagctctacgagttttctagtgtagcatttagggccttttatagagagagaaagaatgatatcatctgccaatgaatattgcttgacttcttcctttcctgtttgaatccatcttgtctccttctcttgccttactgctgtagcaaaaacttcaagtactcagctgaaaagaagtactgagagaaagtatccatgtccctttcctgatttttagcagaaatgcttccagtttttctccggttagcattccgttggctacaggcttgttgtatatttcctttattgtattgaaatacgttccttgtatttctgttgtcttcagggctttaataatgaagagctgttggttttcaccacaggcattttctgaatctactttctgctttcttgaattgagtccatttatacagtggatctcatttactgatttatgtatgttgaacatccctgcaagtctggaatgaagctctttatgatttcagaaaacagatttttcttagtcctcatttgtaacctctccccctagcctgaaacctggctgctcaggtttcactgttagcaggaagagagcgtggggtggacctaccgccctatcgttctgccactcccactgcggctgcctgccacctagctgttcctgagccaacacgtggtcacctgcaactggactcctaggatgatttggcgggaatgggcccctccccctttttataacccagtgtctggaatagtaaaattgaaccttggtcag

SEQ ID NO: 326 - protein, 122 aa, Mus musculus
MKPFHTALSFLILTTALGIWAQITHATETKEVQSSLKAQQGLEIEMFHMGFQDSSDCCLSYNSRIQCSRFIGYFPTSGGCTRPGIIFISKRGFQVCANPSDRRVQRCIERLEQNSQPRTYKQ

SEQ ID NO: 327 - protein, 122 aa, Mus musculus; identical to SEQ ID NO: 326

SEQ ID NO: 328 - protein, 122 aa, Mus musculus; identical to SEQ ID NO: 326

SEQ ID NO: 329 - DNA, 1103 bp, Homo sapiens
cacagagcccgggccgcaggcacctcctcgccagctcttccgctcctctcacagccgccagacccgcctgctgagccccatggcccgcgctgctctctccgccgcccccagcaatccccggctcctgcgagtggcactgctgctcctgctcctggtagccgctggccggcgcgcagcaggagcgtccgtggccactgaactgcgctgccagtgcttgcagaccctgcagggaattcaccccaagaacatccaaagtgtgaacgtgaagtcccccggaccccactgcgcccaaaccgaagtcatagccacactcaagaatgggcggaaagcttgcctcaatcctgcatcccccatagttaagaaaatcatcgaaaagatgctgaacagtgacaaatccaactgaccagaagggaggaggaagctcactggtggctgttcctgaaggaggccctgcccttataggaacagaagaggaaagagagacacagctgcagaggccacctggattgtgcctaatgtgtttgagcatcgcttaggagaagtcttctatttatttatttattcattagttttgaagattctatgttaatattttaggtgtaaaataattaagggtatgattaactctacctgcacactgtcctattatattcattctttttgaaatgtcaaccccaagttagttcaatctggattcatatttaatttgaaggtagaatgttttcaaatgttctccagtcattatgttaatatttctgaggagcctgcaacatgccagccactgtgatagaggctggcggatccaagcaaatggccaatgagatcattgtgaaggcaggggaatgtatgtgcacatctgttttgtaactgtttagatgaatgtcagttgttatttattgaaatgatttcacagtgtgtggtcaacatttctcatgttgaaactttaagaactaaaatgttctaaatatcccttggacattttatgtctttcttgtaaggcatactgccttgtttaatggtagttttacagtgtttctggcttagaacaaaggggcttaattattgatgttttcatagagaatataaaaataaagcacttatag

SEQ ID NO: 330 - DNA, 884 bp, Mus musculus
catgatcccagccacccgctcgcttctctgtgcagcgctgctgctgctggccaccagccgcctggccacaggggcgcctatcgccaatgagctgcgctgtcagtgcctgcagaccatggctgggattcacctcaagaacatccagagcttgaaggtgttgccctcagggccccactgcacccaaaccgaagtcatagccacactcaagaatggtcgcgaggcttgccttgaccctgaagctcccttggttcagaaaattgtccaaaagatgctaaaaggtgtccccaagtaacggagaaagaagacagactgctctgatggcaccgtctggtgaacgctggcttctgacaacactatacaatttcttttgagggtcctatttatttatgtatttatttattccacaaagtgtgtggtttttattttacattaatatttaacagtgtggatacatttcatcgatggtagttcagttctgcttgttcagtttaaagatggtaggcttaaaatatttcattaaaactaatatttattgggagaccactaagtgtcaaccactgtgctagtagaagggtgttgtgcgaaaagaagtgcagagagatagagtttagtattatgttttgtatgtattagggtgaggacatgtgtgggaggctgtgtttgtatgtcttgaaaagaatgtcagttatttattgaaagtcgtctttcatattgtatggtcaacacgcacgtgttgacgcttcccttggacattttgtgtctagttggtagcccataatgggcttttacattctttaaccctgtttctcctggtctcgtctcgctcgggacagagacgttcaaaggactgttacaaatgaagtaaaaataaaagttttattaag

SEQ ID NO: 331 - protein, 107 aa, Homo sapiens
MARAALSAAPSNPRLLRVALLLLLLVAAGRRAAGASVATELRCQCLQTLQGIHPKNIQSVNVKSPGPHCAQTEVIATLKNGRKACLNPASPIVKKIIEKMLNSDKSN

SEQ ID NO: 332 - protein, 107 aa, Homo sapiens; identical to SEQ ID NO: 331

SEQ ID NO: 333 - protein, 33 aa, Homo sapiens
MARAALSAAPSNPRLLRVALLLLLLVAAGRRAA

SEQ ID NO: 334 - protein, 96 aa, Mus musculus
MIPATRSLLCAALLLLATSRLATGAPIANELRCQCLQTMAGIHLKNIQSLKVLPSGPHCTQTEVIATLKNGREACLDPEAPLVQKIVQKMLKGVPK

SEQ ID NO: 335 - protein, 96 aa, Mus musculus; identical to SEQ ID NO: 334

SEQ ID NO: 336 - protein, 107 aa, Mus musculus
PRVRATLQHSTMIPATRSLLCAALLLLATSRLATGAPIANELRCQCLQTMAGIHLKNIQSLKVLPSGPHCTQTEVIATLKNGREACLDPEAPLVQKIVQKMLKGVPK

SEQ ID NO: 337 - DNA, 1110 bp, Homo sapiens
gacagagcccgggccacggagctccttgccagctctcctcctcgcacagccgctcgaaccgcctgctgagccccatggcccgcgccacgctctccgccgcccccagcaatccccggctcctgcgggtggcgctgctgctcctgctcctggtggccgccagccggcgcgcagcaggagcgcccctggccactgaactgcgctgccagtgcttgcagaccctgcagggaattcacctcaagaacatccaaagtgtgaaggtgaagtcccccggaccccactgcgcccaaaccgaagtcatagccacactcaagaatgggcagaaagcttgtctcaaccccgcatcgcccatggttaagaaaatcatcgaaaagatgctgaaaaatggcaaatccaactgaccagaaggaaggaggaagcttattggtggctgttcctgaaggaggccctgccttacaggaacagaagaggaaagagagacacagctgcagaggccacctggcttgcgcctaatgtgtttgagcatacttaggagaagtcttctatttatttatttatttatttatttgtttgttttagaagattctatgttaatattttatgtgtaaaataaggttatgattgaatctacttgcacactctcccattatatttattgtttattttaggtcaaacccaagttagttcaatcctgattcatatttaatttgaagatagaaggtttgcagatattctctagtcatttgttaatatttcttcgtgatgacatatcacatgtcagccactgtgatagaggctgaggaatccaagaaaatggccagtaagatcaatgtgacggcagggaaatgtatgtgtgtctattttgtaactgtaaagatgaatgtcagttgttatttattgaaatgatttcacagtgtgtggtcaacatttctcatgttgaagctttaagaactaaaatgttctaaatatcccttggcattttatgtctttcttgtaagatactgccttgtttaatgttaattatgcagtgtttccctctgtgttagagcagagaggtttcgatatttattgatgttttcacaaagaacaggaaaataaaatatttaaaaatat

SEQ ID NO: 338 - DNA, 1083 bp, Mus musculus
gcttcctcgggcactccagactccagccacacttcagcctagcgccatggcccctcccacctgccggctcctcagtgctgcactggtcctgctgctgctgctggccaccaaccaccaggctacaggggctgttgtggccagtgaactgcgctgtcaatgcctgaagaccctgccaagggttgacttcaagaacatccagagcttgagtgtgacgcccccaggaccccactgcgcccagacagaagtcatagccactctcaagggcggtcaaaaagtttgccttgaccctgaagcccccctggttcagaaaatcatccaaaagatactgaacaaaggcaaggctaactgacctggaaaggaggagcctgggctgctgtccctcaacggaagaaccaaagagaaagaaaaaaacaaacagcacccgggaagcctggatcgtacctgatgtgcctcgctgtctgagagttcacttatttatttatctatgtatttatttatttattaattccattgcccagatgttgttatgtttattatgatatttaaagatatcgattcgctaattcactgtaatatcttaaaaggtcattttaatatgttaaagtttattttaataatgtttaatgtgttcaattaaagttatttaacttatatagttggaaggtgatacatttttaaacctatttattcattagtttctggggagagggtgagttgggaactagctacatcccacccacacagtgaaagagactggggataaggggtgggggtggggacaaatagatgcagtcggatggctttcatggaagtagtgtgcatgttcacatcatttttttgtaagcaccgaggagagtagaacagctgttatttaggtttcagtgtttgtaaactgtatgtacaacatttttgatgctggatttcaatgtaatgttgtgagtaacccttggacattttatgtcttcctcgtaaggcacagtgccttgcttagcaattgttttgtcatgccttttcgtgtcttgaagtggacacatttatttattcatgtatttttacaaataacaaaaaataaaaacgtctgtt

SEQ ID NO: 339 - protein, 107 aa, Homo sapiens
MARATLSAAPSNPRLLRVALLLLLLVAASRRAAGAPLATELRCQCLQTLQGIHLKNIQSVKVKSPGPHCAQTEVIATLKNGQKACLNPASPMVKKIIEKMLKNGKSN

SEQ ID NO: 340 - protein, 107 aa, Homo sapiens; identical to SEQ ID NO: 339

SEQ ID NO: 341 - protein, 107 aa, Homo sapiens; identical to SEQ ID NO: 339

SEQ ID NO: 342 - protein, 33 aa, Homo sapiens
MARATLSAAPSNPRLLRVALLLLLLVAASRRAA

SEQ ID NO: 343 - protein, 100 aa, Mus musculus
MAPPTCRLLSAALVLLLLLATNHQATGAVVASELRCQCLKTLPRVDFKNIQSLSVTPPGPHCAQTEVIATLKGGQKVCLDPEAPLVQKIIQKILNKGKAN

SEQ ID NO: 344 - protein, 100 aa, Mus musculus; identical to SEQ ID NO: 343

SEQ ID NO: 345 - DNA, 2347 bp, Homo sapiens
ctgtttcagggccattggactctccgtcctgcccagagcaagatgtgtcaccagcagttggtcatctcttggttttccctggtttttctggcatctcccctcgtggccatatgggaactgaagaaagatgtttatgtcgtagaattggattggtatccggatgcccctggagaaatggtggtcctcacctgtgacacccctgaagaagatggtatcacctggaccttggaccagagcagtgaggtcttaggctctggcaaaaccctgaccatccaagtcaaagagtttggagatgctggccagtacacctgtcacaaaggaggcgaggttctaagccattcgctcctgctgcttcacaaaaaggaagatggaatttggtccactgatattttaaaggaccagaaagaacccaaaaataagacctttctaagatgcgaggccaagaattattctggacgtttcacctgctggtggctgacgacaatcagtactgatttgacattcagtgtcaaaagcagcagaggctcttctgacccccaaggggtgacgtgcggagctgctacactctctgcagagagagtcagaggggacaacaaggagtatgagtactcagtggagtgccaggaggacagtgcctgcccagctgctgaggagagtctgcccattgaggtcatggtggatgccgttcacaagctcaagtatgaaaactacaccagcagcttcttcatcagggacatcatcaaacctgacccacccaagaacttgcagctgaagccattaaagaattctcggcaggtggaggtcagctgggagtaccctgacacctggagtactccacattcctacttctccctgacattctgcgttcaggtccagggcaagagcaagagagaaaagaaagatagagtcttcacggacaagacctcagccacggtcatctgccgcaaaaatgccagcattagcgtgcgggcccaggaccgctactatagctcatcttggagcgaatgggcatctgtgccctgcagttaggttctgatccaggatgaaaatttggaggaaaagtggaagatattaagcaaaatgtttaaagacacaacggaatagacccaaaaagataatttctatctgatttgctttaaaacgtttttttaggatcacaatgatatctttgctgtatttgtatagttagatgctaaatgctcattgaaacaatcagctaatttatgtatagattttccagctctcaagttgccatgggccttcatgctatttaaatatttaagtaatttatgtatttattagtatattactgttatttaacgtttgtctgccaggatgtatggaatgtttcatactcttatgacctgatccatcaggatcagtccctattatgcaaaatgtgaatttaattttatttgtactgacaacttttcaagcaaggctgcaagtacatcagttttatgacaatcaggaagaatgcagtgttctgataccagtgccatcatacacttgtgatggatgggaacgcaagagatacttacatggaaacctgacaatgcaaacctgttgagaagatccaggagaacaagatgctagttcccatgtctgtgaagacttcctggagatggtgttgataaagcaatttagggccacttacacttctaagcaagtttaatctttggatgcctgaattttaaaagggctagaaaaaaatgattgaccagcctgggaaacataacaagaccccgtctctacaaaaaaaatttaaaattagccaggcgtggtggctcatgcttgtggtcccagctgttcaggaggatgaggcaggaggatctcttgagcccaggaggtcaaggctatggtgagccgtgattgtgccactgcataccagcctaggtgacagaatgagaccctgtctcaaaaaaaaaaatgattgaaattaaaattcagctttagcttccatggcagtcctcacccccacctctctaaaagacacaggaggatgacacagaaacaccgtaagtgtctggaaggcaaaaagatcttaagattcaagagagaggacaagtagttatggctaaggacatgaaattgtcagaatggcaggtggcttcttaacagccctgtgagaagcagacagatgcaaagaaaatctggaatccctttctcattagcatgaatgaacctgatacacaattatgaccagaaaatatggctccatgaaggtgctacttttaagtaatgtatgtgcgctctgtaaagtgattacatttgtttcctgtttgtttatttatttatttatttttgcattctgaggctgaactaataaaaactcttctttgtaatc

SEQ ID NO: 346 - DNA, 1951 bp, Mus musculus
agaaggaacagtgggtgtccaggcacatcagaccaggcagctcgcagcaaagcaaggtaagttctctcctcttccctgtcgctaactccctgcatctagaggctgtccagattcagactccaggggacaggctacccctgaaccaggcagcgtgggagtgggatgtgtcctcagaagctaaccatctcctggtttgccatcgttttgctggtgtctccactcatggccatgtgggagctggagaaagacgtttatgttgtagaggtggactggactcccgatgcccctggagaaacagtgaacctcacctgtgacacgcctgaagaagatgacatcacctggacctcagaccagagacatggagtcataggctctggaaagaccctgaccatcactgtcaaagagtttctagatgctggccagtacacctgccacaaaggaggcgagactctgagccactcacatctgctgctccacaagaaggaaaatggaatttggtccactgaaattttaaaaaatttcaaaaacaagactttcctgaagtgtgaagcaccaaattactccggacggttcacgtgctcatggctggtgcaaagaaacatggacttgaagttcaacatcaagagcagtagcagttcccctgactctcgggcagtgacatgtggaatggcgtctctgtctgcagagaaggtcacactggaccaaagggactatgagaagtattcagtgtcctgccaggaggatgtcacctgcccaactgccgaggagaccctgcccattgaactggcgttggaagcacggcagcagaataaatatgagaactacagcaccagcttcttcatcagggacatcatcaaaccagacccgcccaagaacttgcagatgaagcctttgaagaactcacaggtggaggtcagctgggagtaccctgactcctggagcactccccattcctacttctccctcaagttctttgttcgaatccagcgcaagaaagaaaagatgaaggagacagaggaggggtgtaaccagaaaggtgcgttcctcgtagagaagacatctaccgaagtccaatgcaaaggcgggaatgtctgcgtgcaagctcaggatcgctattacaattcctcgtgcagcaagtgggcatgtgttccctgcagggtccgatcctaggatgcaacgttggaaaggaaagaaaagtggaagacattaaggaagaaaaatttaaactcaggatggaagagtcccccaaaagctgtcttctgcttggttggctttttccagttttcctaagttcatcatgacacctttgctgatttctacatgtaaatgttaaatgcccgcagagccagggagctaatgtatgcatagatattctagcattccacttggccttatgctgttgaaatatttaagtaatttatgtatttattaatttatttctgcatttcacatttgtataccaagatgtattgaatatttcatgtgcttgtggcctgatccactgggaccaggccctattatgcaaattgtgagcttgttatcttcttcaacagctcttcaatcagggcttcgtaggtacattagcttttgtgacaaccaataagaacataatattctgacacaagcagtgttacatatttgtgaccagtaaagacataggtggtatttggagacatgaagaagctgtaaagttgactctgaagagtttagcactagtttcaacaccaagaaagactttttagaagtgatattgataagaaaccagggccttctttagaagggtacctaaatttaaaagaattttgaaaggctgggtatcggtggtatatgcttttaattccagcactcaggagaccaaggcaggcagatctctgtgagtttgaggacagcctggtgtacagagggagttccagcacagccagtgccacacagaaattctgtctcaaaaaca

SEQ ID NO: 347 - protein, 328 aa, Homo sapiens
MCHQQLVISWFSLVFLASPLVAIWELKKDVYVVELDWYPDAPGEMVVLTCDTPEEDGITWTLDQSSEVLGSGKTLTIQVKEFGDAGQYTCHKGGEVLSHSLLLLHKKEDGIWSTDILKDQKEPKNKTFLRCEAKNYSGRFTCWWLTTISTDLTFSVKSSRGSSDPQGVTCGAATLSAERVRGDNKEYEYSVECQEDSACPAAEESLPIEVMVDAVHKLKYENYTSSFFIRDIIKPDPPKNLQLKPLKNSRQVEVSWEYPDTWSTPHSYFSLTFCVQVQGKSKREKKDRVFTDKTSATVICRKNASISVRAQDRYYSSSWSEWASVPCS

SEQ ID NO: 348 - protein, 328 aa, Homo sapiens; identical to SEQ ID NO: 347

SEQ ID NO: 349 - protein, 18 aa, Homo sapiens
QDRYYSSSWSEWASVPCS

SEQ ID NO: 350 - protein, 335 aa, Mus musculus
MCPQKLTISWFAIVLLVSPLMAMWELEKDVYVVEVDWTPDAPGETVNLTCDTPEEDDITWTSDQRHGVIGSGKTLTITVKEFLDAGQYTCHKGGETLSHSHLLLHKKENGIWSTEILKNFKNKTFLKCEAPNYSGRFTCSWLVQRNMDLKFNIKSSSSSPDSRAVTCGMASLSAEKVTLDQRDYEKYSVSCQEDVTCPTAEETLPIELALEARQQNKYENYSTSFFIRDIIKPDPPKNLQMKPLKNSQVEVSWEYPDSWSTPHSYFSLKFFVRIQRKKEKMKETEEGCNQKGAFLVEKTSTEVQCKGGNVCVQAQDRYYNSSCSKWACVPCRVRS

SEQ ID NO: 351 - protein, 335 aa, Mus musculus; identical to SEQ ID NO: 350

SEQ ID NO: 352 - DNA, 3426 bp, Homo sapiens
gtaggaatcgcagcgccaacggttgcaaggcccaagaagccatcctgggaaggaaaatgcattggggaaccctgtgcggattcttgtggctttggccctatcttttctatgtccaagctgtgcccatccaaaaagtccaagatgacaccaaaaccctcatcaagacaattgtcaccaggatcaatgacatttcacacacgcagtcagtctcctccaaacagaaagtcaccggtttggacttcattcctgggctccaccccatcctgaccttatccaagatggaccagacactggcagtctaccaacagatcctcaccagtatgccttccagaaacgtgatccaaatatccaacgacctggagaacctccgggatcttcttcacgtgctggccttctctaagagctgccacttgccctgggccagtggcctggagaccttggacagcctggggggtgtcctggaagcttcaggctactccacagaggtggtggccctgagcaggctgcaggggtctctgcaggacatgctgtggcagctggacctcagccctgggtgctgaggccttgaaggtcactcttcctgcaaggactacgttaagggaaggaactctggcttccaggtatctccaggattgaagagcattgcatggacaccccttatccaggactctgtcaatttccctgactcctctaagccactcttccaaaggcataagaccctaagcctccttttgcttgaaaccaaagatatatacacaggatcctattctcaccaggaagggggtccacccagcaaagagtgggctgcatctgggattcccaccaaggtcttcagccatcaacaagagttgtcttgtcccctcttgacccatctccccctcactgaatgcctcaatgtgaccaggggtgatttcagagagggcagaggggtaggcagagcctttggatgaccagaacaaggttccctctgagaattccaaggagttccatgaagaccacatccacacacgcaggaactcccagcaacacaagctggaagcacatgtttatttattctgcattttattctggatggatttgaagcaaagcaccagcttctccaggctctttggggtcagccagggccaggggtctccctggagtgcagtttccaatcccatagatgggtctggctgagctgaacccattttgagtgactcgagggttgggttcatctgagcaagagctggcaaaggtggctctccagttagttctctcgtaactggtttcatttctactgtgactgatgttacatcacagtgtttgcaatggtgttgccctgagtggatctccaaggaccaggttattttaaaaagatttgttttgtcaagtgtcatatgtaggtgtctgcacccaggggtggggaatgtttgggcagaagggagaaggatctagaatgtgttttctgaataacatttgtgtggtgggttctttggaaggagtgagatcattttcttatcttctgcaattgcttaggatgtttttcatgaaaatagctctttcaggggggttgtgaggcctggccaggcaccccctggagagaagtttctggccctggctgaccccaaagagcctggagaagctgatgctttgcttcaaatccatccagaataaaacgcaaagggctgaaagccatttgttggggcagtggtaagctctggctttctccgactgctagggagtggtctttcctatcatggagtgacggtcccacactggtgactgcgatcttcagagcaggggtccttggtgtgaccctctgaatgggtccagggttgatcacactctgggtttattacatggcagtgttcctatttggggcttgcatgccaaattgtagttcttgtctgattggctcacccaagcaaggccaaaattaccaaaaatcttggggggtttttactccagtggtgaagaaaactcctttagcaggtggtcctgagacctgacaagcactgctaggcgagtgccaggactccccaggccaggccaccaggatgcccttcccactggaggtcacattcaggaagatgaaagaggaggtttggggtctgccaccatcctgctgctgtgtttttgctatcacacagtgggtggtggatctgtccaaggaaacttgaatcaaagcagttaactttaagactgagcacctgcttcatgctcagccctgactggtgctataggctggagaagctcacccaataaacattaagattgaggcctgccctcagggatcttgcgttcccagtggtcaaaccgcactcacccatgtgccaaggtggggtatttaccacagcagctgaacagccaaatgcatggtgcagttgacagcaggtgggaaatggtatgagctgaggggggccgtgcccaggggcccacagggaaccctgcttgcactttgtaacatgtttacttttcagggcatcttagcttctattatagccacatccctttgaaacaagataactgagaatttaaaaataagaaaatacataagaccataacagccaacaggtggcaggaccaggactatagcccaggtcctctgatacccagagcattacgtgagccaggtaatgagggactggaaccagggagaccgagcgctttctggaaaagaggagtttcgaggtagagtttgaaggaggtgagggatgtgaattgcctgcagagagaagcctgttttgttggaaggtttggtgtgtggagatgcagaggtaaaagtgtgagcagtgagttacagcgagaggcagagaaagaagagacaggagggcaagggccatgctgaagggaccttgaagggtaaagaagtttgatattaaaggagttaagagtagcaagttctagagaagaggctggtgctgtggccagggtgagagctgctctggaaaatgtgacccagatcctcacaaccacctaatcaggctgaggtgtcttaagccttttgctcacaaaacctggcacaatggctaattcccagagtgtgaaacttcctaagtataaatggttgtctgtttttgtaacttaaaaaaaaaaaaaaaagtttggccgggtgcggtggctcacgcctgtaatcccagcactttgggaggccaaggtggggggatcacaaggtcactagatggcgagcatcctggccaacatggtgaaaccccgtctctactaaaaacacaaaagttagctgagcgtggtggcgggcgcctgtagtcccagccactcgggaggctgagacaggagaatcgcttaaacctgggaggcggagagtacagtgagccaagatcgcgccactgcactccggcctgatgacagagcgagattccgtcttaaaaaaaaaaaaaaaaaaagtttgtttttaaaaaaatctaaataaaataactttgccccctg

SEQ ID NO: 353 - DNA, 3257 bp, Mus musculus
gagggatccctgctccagcagctgcaaggtgcaagaagaagaagatcccagggaggaaaatgtgctggagacccctgtgtcggttcctgtggctttggtcctatctgtcttatgttcaagcagtgcctatccagaaagtccaggatgacaccaaaaccctcatcaagaccattgtcaccaggatcaatgacatttcacacacgcagtcggtatccgccaagcagagggtcactggcttggacttcattcctgggcttcaccccattctgagtttgtccaagatggaccagactctggcagtctatcaacaggtcctcaccagcctgccttcccaaaatgtgctgcagatagccaatgacctggagaatctccgagacctcctccatctgctggccttctccaagagctgctccctgcctcagaccagtggcctgcagaagccagagagcctggatggcgtcctggaagcctcactctactccacagaggtggtggctttgagcaggctgcagggctctctgcaggacattcttcaacagttggatgttagccctgaatgctgaagtttcaaaggccaccaggctcccaagaatcatgtagagggaagaaaccttggcttccaggggtcttcaggagaagagagccatgtgcacacatccatcattcatttctctccctcctgtagaccacccatccaaaggcatgactccacaatgcttgactcaagttatccacacaacttcatgagcacaaggaggggccagcctgcagaggggactctcacctagttcttcagcaagtagagataagagccatcccatcccctccatgtcccacctgctccgggtacatgttcctccgtgggtacacgcttcgctgcggcccaggagaggtgaggtagggatgggtagagcctttgggctgtctcagagtctttgggagcaccgtgaaggctgcatccacacacagctggaaactcccaagcagcacacgatggaagcacttatttatttattctgcattctattttggatggatctgaagcaagccatcagctttttcaggctttgggggtcagccaggatgaggaaggctcctggggtgctgctttcaatcctattgatgggtctgcccaaggcaaacctaatttttgagtgactggaaggaaggttgggatcttccaaacaagagtctatgcaggtagcgctcaagcttgacctctggtgactggttttgtttctattgtgactgactctatgcaaacacgtttgcagcggcattgccgggagcataggctaggttattatcaaaagcagatgaattttgtcaagtgtaatatgtatctatgtgcacctgagggtagaggatgtgttagagggagggtgaaggatccggaagtgttctctgaattacatatgtgtggtaggcttttctgaaagggtgaggcattttcttacctctgtggccacatagtgtggctttgtgaaaaggacaaaggagttgactctttccggaacatttggagtgtaccaggcacccttggaggggctaaagctacaggccttttgttggcatattgctgagctcagggagtgagggccccacatttgagacagtgagccccaagaaaagggtccctggtgtagatctccaaggttgtccagggttgatctcacaatgcgtttcttaagcaggtagacgtttgcatgccaatatgtggttctcatctgattggttcatccaaagtagaaccctgtctcccacccattctgtggggagttttgttccagtgggaatgagaaatcacttagcagatggtcctgagccctgggccagcactgctgaggaagtgccagggccccaggccaggctgccagaattgcccttcgggctggaggatgaacaaaggggcttgggtttttccatcacccctgcaccctatgtcaccatcaaactggggggcagatcagtgagaggacacttgatggaaagcaatacactttaagactgagcacagtttcgtgctcagctctgtctggtgctgtgagctagagaagctcaccaaatacatataaaaatcagaggctcatgtccctgtggttagaccctactcacggcggtgtactccaccacagcagccccgcaccgctggaagtacagtgctgtcttcaacaggtgtgaaagaacctgagctgagggtgacagtgcccaggggaaccctgcttgcagtctattgcatttacataccgcatttcagggcacattagcatccactgctatggtagcacactgttgacacgggatacctggggtcgtaaaaataagaaaatacaggttgactatcccttatccaaaatgcttgggactagaagagttttggattttagagtcttttcaggcataggtatatttgagtatatataaaatgagatatcttggggatggggcccaagtataaacatgaagttcatttatatttcataataccgtatagacactgcttgaagtgtagttttatacagtgttttaaataacgttgtatgcatgaaagacgtttttacagcatgaacctgtctactcatgccagcactcaaaaaccttggggttttggagcagtttggatcttgggttttctgttaagagatggttagcttatacctaaaaccataatggcaaacaggctgcaggaccagactggatcctcagccctgaagtgtgcccttccagccaggtcataccctgtggaggtgagcgggatcaggttttgtggtgctaagagaggagttggaggtagattttggaggatctgaggggtgatgtgatgttttattggacacttggtatgttgaagggatgaaagtccaaacaggaagtgacagggaagactgaagagaccgggaaagagtgacaggaagtgctgagaggactttatgggccacaaaagtggcttctgaaagatcccacgtgccacagtctggagcgaaggctcgtggtggctggtgtcagattgctctggggctgtgctatgccaccttggtcacctcatcaagctggaatgtcctgagcctttcgctcagagaaccttgcactatggcttgttcccagattgtgaaacttcccatatgcaaaaatgcttggtttggtttttttggtttttgtttttgttttcttttttaaatacatatatatatgtaacaacagcaacaacaaaattttgttttattttgtgtcaattcaaataaattaatgatgcctcc

SEQ ID NO: 354 - protein, 167 aa, Homo sapiens
MHWGTLCGFLWLWPYLFYVQAVPIQKVQDDTKTLIKTIVTRINDISHTQSVSSKQKVTGLDFIPGLHPILTLSKMDQTLAVYQQILTSMPSRNVIQISNDLENLRDLLHVLAFSKSCHLPWASGLETLDSLGGVLEASGYSTEVVALSRLQGSLQDMLWQLDLSPGC

SEQ ID NO: 355 - protein, 167 aa, Homo sapiens; identical to SEQ ID NO: 354

SEQ ID NO: 356 - protein, 38 aa, Homo sapiens
WLWPYLFYVQAVPIQKVQDDTKTLIKTIVTRINDISHT

SEQ ID NO: 357 - protein, 167 aa, Homo sapiens [sequence omitted]

SEQ ID NO: 358 - protein, 167 aa, Mus musculus
MCWRPLCRFLWLWSYLSYVQAVPIQKVQDDTKTLIKTIVTRINDISHTQSVSAKQRVTGLDFIPGLHPILSLSKMDQTLAVYQQVLTSLPSQNVLQIANDLENLRDLLHLLAFSKSCSLPQTSGLQKPESLDGVLEASLYSTEVVALSRLQGSLQDILQQLDVSPEC

SEQ ID NO: 359 - protein, 167 aa, Mus musculus; identical to SEQ ID NO: 358

SEQ ID NO: 360 - protein, 167 aa, Mus musculus; identical to SEQ ID NO: 358

1. A method for classifying a sample obtained from a mammalian subject, comprising:
obtaining a dataset associated with said sample, wherein said dataset comprises quantitative data for at least three protein markers selected from the group consisting of MCP-1, MCP-2, MCP-3, MCP-4, eotaxin, IP-10, M-CSF, IL-3, TNFa, Ang-2, IL-5, IL-7, and IGF-1;
inputting said data into an analytical process that uses said data to classify said sample, wherein said classification is selected from the group consisting of an atherosclerotic cardiovascular disease classification, a healthy classification, a medication exposure classification, a no medication exposure classification; and
classifying said sample according to the output of said process.

2. The method of claim 1, wherein said analytical process comprises use of a predictive model.

3. The method of claim 1, wherein said analytical process comprises comparing said obtained dataset with a reference dataset.

4. The method of claim 3, wherein said reference dataset comprises data obtained from one or more healthy control subjects, or comprises data obtained from one or more subjects diagnosed with an atherosclerotic disease.

5. The method of claim 3, further comprising obtaining a statistical measure of a similarity of said obtained dataset to said reference dataset.

6. The method of claim 5, wherein said statistical measure is derived from a comparison of at least three parameters of said obtained dataset to corresponding parameters from said reference dataset.

7. The method of claim 1, wherein said at least three protein markers comprise a marker set selected from the group consisting of MCP-1, IGF-1, TNFa; MCP-1, IGF-1, M-CSF; ANG-2, IGF-1, M-CSF; and MCP-4, IGF-1, M-CSF.

8. The method of claim 1, wherein said dataset comprises quantitative data for at least four protein markers selected from the group consisting of MCP-1, MCP-2, MCP-3, MCP-4, eotaxin, IP-10, M-CSF, IL-3, TNFa, Ang-2, IL-5, IL-7, and IGF-1.

9. The method of claim 8, wherein said at least four protein markers comprise a marker set selected from the group consisting of MCP-1, IGF-1, TNFa, IL-5; MCP-1, IGF-1, M-CSF, MCP-2; ANG-2, IGF-1, M-CSF, IL-5; MCP-1, IGF-1, TNFa, MCP-2; and MCP-4, IGF-1, M-CSF, IL-5.

10. The method of claim 1, wherein said dataset comprises quantitative data for at least five markers selected from the group consisting of MCP-1, MCP-2, MCP-3, MCP-4, eotaxin, IP-10, M-CSF, IL-3, TNFa, Ang-2, IL-5, IL-7, and IGF-1.

11. The method of claim 10, wherein said at least five protein markers are selected from the group consisting of MCP-1, IGF-1, TNFa, IL-5, M-CSF; MCP-1, IGF-1, M-CSF, MCP-2, IP-10; ANG-2, IGF-1, M-CSF, IL-5, TNFa; MCP-1, IGF-1, TNFa, MCP-2, IP-10; MCP-4, IGF-1, M-CSF, IL-5, TNFa; and MCP-4, IGF-1, M-CSF, IL-5, MCP-2.

12. A method for classifying a sample obtained from a mammalian subject, comprising:
obtaining a dataset associated with said sample, wherein said dataset comprises quantitative data for at least three protein markers selected from the group consisting of MCP1; MCP2; MCP3; MCP4; Eotaxin; IP10; MCSF; IL3; TNFα; Ang2; IL5; IL7; IGF1; IL10; INFγ; VEGF; MIP1a; RANTES; IL6; IL8; ICAM; TIMP1; CCL19; TCA4/6kine/CCL21; CSF3; TRANCE; IL2; IL4; IL13; Il1b; MCP5; CCL9; CXCL1/GRO1; GROalpha; IL12; and Leptin;
inputting said data into a predictive model that uses said data to classify said sample, wherein said classification is selected from the group consisting of an atherosclerotic cardiovascular disease classification, a healthy classification, a medication exposure classification, a no medication exposure classification, wherein said predictive model has at least one quality metric of at least 0.7 for classification; and
classifying said sample according to the output of said predictive model.

13. The method of claim 12, wherein said predictive model has a quality metric of at least 0.8 for classification.

14. The method of claim 13, wherein said predictive model has a quality metric of at least 0.9 for classification.

15. The method of claim 12, wherein said quality metric is selected from AUC and accuracy.

16. The method of claim 12, wherein the limits of said predictive model are adjusted to provide at least one of sensitivity or specificity of at least 0.7.

17. The method of claim 14, wherein the limits of said predictive model are adjusted to provide at least one of sensitivity or specificity of at least 0.7.

18. The method of claim 1, wherein said atherosclerotic disease classification is selected from the group consisting of coronary artery disease, myocardial infarction, and angina.

19. The method of claim 1, further comprising using said classification for atherosclerosis diagnosis, atherosclerosis staging, atherosclerosis prognosis, vascular inflammation levels, assessing extent of atherosclerosis progression, monitoring a therapeutic response, predicting a coronary calcium score, or distinguishing stable from unstable manifestations of atherosclerotic disease.

20. The method of claim 1, wherein said dataset further comprises data for one or more clinical indicia.

21. The method of claim 20, wherein said one or more clinical indicia are selected from the group consisting of age, gender, LDL concentration, HDL concentration, triglyceride concentration, blood pressure, body mass index, CRP concentration, coronary calcium score, waist circumference, tobacco smoking status, previous history of cardiovascular disease, family history of cardiovascular disease, heart rate, fasting insulin concentration, fasting glucose concentration, diabetes status, and use of high blood pressure medication.

22. The method of claim 1, wherein said sample comprises blood or a blood derivative.

23. The method of claim 1, wherein said analytic process comprises using a Linear Discriminant Analysis model, a support vector machine classification algorithm, a recursive feature elimination model, a prediction analysis of microarray model, a Logistic Regression model, a CART algorithm, a FlexTree algorithm, a LART algorithm, a random forest algorithm, a MART algorithm, or Machine Learning algorithms.

24. The method of claim 23, wherein said process comprises using a Linear Discriminant Analysis model or a Logistic Regression model, and said model comprises terms selected to provide a quality metric greater than 0.75.

25. The method of claim 1, further comprising obtaining a plurality of classifications for a plurality of samples obtained at a plurality of different times from said subject.

26. A method for classifying a sample obtained from a mammalian subject, comprising:
obtaining a dataset associated with said sample, wherein said dataset comprises quantitative data for at least three protein markers that each shows a correlation between a circulating protein concentration and an atherosclerotic vascular tissue RNA concentration;
inputting said data into an analytical process that uses said data to classify said sample, wherein said classification is selected from the group consisting of an atherosclerotic cardiovascular disease classification, a healthy classification, a medication exposure classification, a no medication exposure classification; and
classifying said sample according to the output of said process.

27. The method of claim 26, wherein said correlation is characterized by a Pearson correlation coefficient of at least 0.6.

28. The method of claim 27, wherein said at least three protein markers comprise one or more protein markers selected from the set consisting of MCP-1, CCL21, CCL19, CCL112, TNFSF11, and CCL11.

29. The method of claim 26, wherein said mammalian subject is a human subject.

30. A method for classifying a sample obtained from a mammalian subject, comprising:
obtaining a dataset associated with said sample, wherein said dataset comprises quantitative data for at least three protein markers that each shows a correlation between a circulating protein concentration and an atherosclerotic vascular tissue RNA concentration,
inputting said data into a predictive model that uses said data to classify said sample, wherein said classification is selected from the group consisting of an atherosclerotic cardiovascular disease classification, a healthy classification, a medication exposure classification, a no medication exposure classification, wherein said predictive model has at least one quality metric of at least 0.7 for classification; and
classifying said sample according to the output of said predictive model.

31. The method of claim 30, wherein said correlation is characterized by a Pearson correlation coefficient of at least 0.6.

32. The method of claim 31, wherein said at least three protein markers comprise one or more protein markers selected from the set consisting of MCP-1, CCL21, CCL19, CCLl12, TNFSF11, and CCL11.

33. The method of claim 30, wherein said mammalian subject is a human subject.
